(19) United States
(12) Patent Application Publication
(10) Pub. No.: US 2005/0080031 A1
(43) Pub. Date: Apr. 14, 2005

(54) Nucleic acid treatment of diseases or conditions related to levels of Ras, HER2 and HIV

(75) Inventor: James McSwiggen, Boulder, CO (US)

Correspondence Address: MCDONNELL BOEHNEN HULBERT & BERGHOFF LLP, 300 S. WACKER DRIVE, 32ND FLOOR, CHICAGO, IL, 60606, US

(73) Assignee: Sirna Therapeutics, Inc., Boulder, CO (US)

(21) Appl. No.: 10/724,270

(22) Filed: Nov. 26, 2003

Related U.S. Application Data
(63) Continuation-in-part of application No. PCT/US02/16840, filed on May 29, 2002.
(63) Continuation-in-part of application No. 10/157,580, filed on May 29, 2002.
(63) Continuation-in-part of application No. 10/163,552, filed on Jun. 6, 2002.
(63) Continuation-in-part of application No. 10/238,700, filed on Sep. 10, 2002.
(63) Continuation-in-part of application No. 10/693,059, filed on Oct. 23, 2003.
Application No. 10/693,059 is a continuation-in-part of application No. 10/444,853, filed on May 23, 2003.
Application No. 10/444,853 is a continuation-in-part of application No. 10/417,012, filed on Apr. 16, 2003, now abandoned.
(63) Continuation-in-part of application No. 10/652,791, filed on Aug. 29, 2003.
(63) Continuation-in-part of application No. 10/422,704, filed on Apr. 24, 2003, now abandoned.
Application No. 10/693,059 is a continuation-in-part of application No. 10/427,160, filed on Apr. 30, 2003.
Application No. 10/693,059 is a continuation-in-part of application No. PCT/US02/15876, filed on May 20, 2002.
(63) Continuation-in-part of application No. PCT/US03/05346, filed on Feb. 20, 2003.
(63) Continuation-in-part of application No. PCT/US03/05028, filed on Feb. 20, 2003.
(60) Provisional application No. 60/294,140, filed on May 29, 2001.
(60) Provisional application No. 60/296,249, filed on Jun. 6, 2001.
(60) Provisional application No. 60/318,471, filed on Sep. 10, 2001.
(60) Provisional application No. 60/292,217, filed on May 18, 2001.
(60) Provisional application No. 60/306,883, filed on Jul. 20, 2001.
(60) Provisional application No. 60/311,865, filed on Aug. 13, 2001.
(60) Provisional application No. 60/362,016, filed on Mar. 6, 2002.
(60) Provisional application No. 60/358,580, filed on Feb. 20, 2002.
(60) Provisional application No. 60/363,124, filed on Mar. 11, 2002.
(60) Provisional application No. 60/386,782, filed on Jun. 6, 2002.
(60) Provisional application No. 60/406,784, filed on Aug. 29, 2002.
(60) Provisional application No. 60/408,378, filed on Sep. 5, 2002.
(60) Provisional application No. 60/409,293, filed on Sep. 9, 2002.
(60) Provisional application No. 60/440,129, filed on Jan. 15, 2003.

(51) Int. Cl. A61K 48/00; C07H 21/02

(52) U.S. Cl. 514/44; 536/23.1

(57) ABSTRACT

The present invention relates to nucleic acid molecules, including enzymatic nucleic acid molecules, such as DNAzymes (e.g. DNA enzymes, catalytic DNA), siRNA, aptamers, and antisense that modulate the expression of Ras genes such as K-Ras, H-Ras, and/or N-Ras, HIV genes such as HIV-1, and HER2 genes.

[0001] This application is a continuation-in-part of International Application No. PCT/US02/16840, filed May 29, 2002, which claims the benefit of U.S. Provisional Application No. 60/294,140, filed May 29, 2001, U.S. Provisional Application No. 60/296,249, filed Jun. 6, 2001, and U.S. Provisional Application No. 60/318,471, filed Sep. 10, 2001; this application is also a continuation-in-part of application Ser. No. 10/157,580, filed May 29, 2002, and is also a continuation-in-part of application Ser. No. 10/163,552, filed Jun. 6, 2002, and is also a continuation-in-part of application Ser. No. 10/238,700, filed Sep. 10, 2002; this application is also a continuation-in-part of application Ser. No. 10/693,059, filed Oct. 23, 2002, which is a continuation-in-part of application Ser. No. 10/444,853, filed May 23, 2003, which is a continuation-in part of U.S. patent application Ser. No. 10/417,012, filed Apr. 16, 2003; and application Ser. No. 10/693,059 is also a continuation-in-part of application Ser. No. 10/427,160, filed Apr. 30, 2003, and International Application No. PCT/US02/15876, filed May 17, 2002, which claims the benefit of U.S. Provisional Application No. 60/292,217, filed May 18, 2001, U.S. Provisional Application No. 60/306,883, filed Jul. 20, 2001, U.S. Provisional Application No. 60/311,865, filed Aug. 13, 2001, and U.S. Provisional Application No. 60/362,016, filed Mar. 6, 2002; this application is also a continuation-in-part of U.S. application Ser. No. 10/652,791, filed Aug. 29, 2003, and also a continuation-in-part of U.S. application Ser. No. 10/422,704, filed Apr. 24, 2003; this application is also a continuation-in-part of International Patent Application No. PCT/US03/05346, filed Feb. 20, 2003, and a continuation-in-part of International Patent Application No. PCT/US03/05028, filed Feb. 20, 2003, both of which claim the benefit of U.S. Provisional Application No. 60/358,580, filed Feb. 20, 2002, U.S. Provisional Application No. 60/363,124, filed Mar. 11, 2002, U.S. Provisional Application No. 60/386,782, filed Jun. 6, 2002, U.S. Provisional Application No. 60/406,784, filed Aug. 29, 2002, U.S. Provisional Application No. 60/408,378, filed Sep. 5, 2002, U.S. Provisional Application No. 60/409,293, filed Sep. 9, 2002, and U.S. Provisional Application No. 60/440,129, filed Jan. 15, 2003. The instant application claims the benefit of all the listed applications, which are hereby incorporated by reference herein in their entireties, including the drawings.

### TECHNICAL FIELD OF THE INVENTION

[0002] The present invention relates to novel nucleic acid compounds and methods for the treatment or diagnosis of diseases or conditions related to levels of Ras gene expression, such as K-Ras, H-Ras, and/or N-Ras expression, HIV infection such as HIV-1, and HER2 gene expression.

### BACKGROUND OF THE INVENTION

[0003] Transformation is a cumulative process whereby normal control of cell growth and differentiation is interrupted, usually through the accumulation of mutations affecting the expression of genes that regulate cell growth and differentiation.

[0004] The platelet derived growth factor (PDGF) system has served as a prototype for identification of substrates of the receptor tyrosine kinases. Certain enzymes become activated by the PDGF receptor kinase, including phospholipase C and phosphatidylinositol 3′ kinase, Ras guanosine triphosphate (GTPase) activating protein (GAP) and src-like tyrosine kinases. GAP regulates the function of the Ras protein by stimulating the GTPase activity of the 21 kD Ras protein. Barbacid, 56 Ann. Rev. Biochem. 779, 1987. Microinjection of oncogenically activated Ras into NIH 3T3 cells has been shown to induce DNA synthesis. Mutations that cause oncogenic activation of Ras lead to accumulation of Ras bound to GTP, the active form of the molecule. These mutations block the ability of GAP to convert Ras to the inactive form. Mutations that impair the interactions of Ras with GAP also block the biological function of Ras.

[0005] While a number of Ras alleles exist (N-Ras, K-Ras, H-Ras) which have been implicated in carcinogenesis, the type most often associated with colon and pancreatic carcinomas is K-Ras. Enzymatic nucleic acid molecules which are targeted to certain regions of the K-Ras allelic mRNAs may also prove inhibitory to the function of the other allelic mRNAs of the N-Ras and H-Ras genes.

[0006] Scanlon, International PCT Publication Nos. WO 91/18625, WO 91/18624, and WO 91/18913 describes a ribozyme effective to cleave oncogene RNA from the H-Ras gene. This ribozyme is said to inhibit H-ras expression in response to exogenous stimuli. Reddy WO92/00080 describes the use of ribozymes as therapeutic agents for leukemias, such as chronic myelogenous leukemia (CML) by targeting specific portions of the BCR-ABL gene transcript.

[0007] Thompson et al., International PCT publication No. WO 99/54459, describe nucleic acid molecules that modulate gene expression, including Ras gene expression.

[0008] Zhang et al., 2000, Gene Ther., 7, 2041; Takunaga et al., 2000, Br. J. Cancer., 83, 833; Zhang et al., 2000, Mol. Biotechnol., 15, 39; Irie et al., 2000, Mol. Urol. 4, 61; Kijima and Scanlon, 2000, Mol. Biotechnol., 14, 59; Funato et al., 2000, Cancer Gene Ther., 7, 495; Tsuchida et al., 2000, Cancer Gene Ther., 7, 373; Zhang et al., 2000, Methods Mol. Med., 35, 261; Irie et al., 1999, Antisense Nucleic Acid Drug Dev., 9, 341; Giannini et al., 1999, Nucleic Acids Res., 27, 2737; Fang et al., 1999, J. Med. Coll. PLA, 14, 25; Tong et al., 1998, Methods Mol. Med., 11, 209; Ohkawa and Kashani-Sabet, 1998, Methods Mol. Med., 11, 153; Scherr et al., 1999, Gene Ther., 6, 152; Tsuchida et al., 1998, Biochem. Biophys. Res. Commun., 252, 368; Scherr et al., 1998, Gene Ther., 5, 1227; Uhlmann et al., European Patent Application EP 808898; Scherr et al., 1997, J. Biol. Chem., 272, 14304; Chang et al., 1997, J. Cancer Res. Clin. Oncol., 123, 91; Ohta et al., 1996, Nucleic Acids Res., 24, 938; Ohta et al., 1994, Ann. N.Y. Acad. Sci., 716, 242; and Funato et al., 1994, Biochem. Pharmacol., 48, 1471 all describe specific ribozymes targeting certain K-Ras, H-Ras, or N-Ras RNA sequences.

[0009] Todd, International PCT Publication Nos. WO 01/49877, WO 99/50452, and WO 99/45146 describes specific DNAzymes targeting K-Ras for diagnostic applications.

[0010] Acquired immunodeficiency syndrome (AIDS) is thought to be caused by infection with the human immunodeficiency virus, for example HIV-1. Draper et al., U.S. Pat. Nos. 6,159,692, 5,972,704, 5,693,535, and International PCT Publication Nos. WO WO 93/23569, WO 95/04818, describe enzymatic nucleic acid molecules targeting HIV. Todd et al., International PCT Publication No. WO 99/50452, describe methods for using specific DNAzyme motifs for detecting the presence of certain HIV RNAs. Sriram and Banerjea, 2000, Biochem J., 352, 667-673, describe specific RNA cleaving DNA enzymes targeting HIV-1. Zhang et al., 1999, FEBS Lett., 458, 151-156, describe specific RNA cleaving DNA enzymes used in the inhibition of HIV-1 infection.

[0011] HER2 (also known as neu, erbB2 and c-erbB2) is an oncogene that encodes a 185-kDa transmembrane tyrosine kinase receptor. HER2 is a member of the epidermal growth factor receptor (EGFR) family and shares partial homology with other family members. In normal adult tissues HER2 expression is low. However, HER2 is overexpressed in at least 25-30% of breast (McGuire, H. C. and Greene, M. I. (1989) The neu (c-erbB-2) oncogene. Semin. Oncol. 16: 148-155) and ovarian cancers (Berchuck, A. Kamel, A., Whitaker, R. et al. (1990)). Overexpression of her-2/neu is associated with poor survival in advanced epithelial ovarian cancer. Cancer Research 50: 4087-4091). Furthermore, overexpression of HER2 in malignant breast tumors has been correlated with increased metastasis, chemoresistance and poor survival rates (Slamon et al., 1987 Science 235: 177-182). Because HER2 expression is high in aggressive human breast and ovarian cancers, but low in normal adult tissues, it is an attractive target for enzymatic nucleic acid-mediated therapy. McSwiggen et al., International PCT Publication No. WO 01/16312 and Beigelman et al., International PCT Publication No. WO 99/55857 describe enzymatic nucleic acid molecules targeting HER2. Thompson and Draper, U.S. Pat. No. 5,599,704, describes enzymatic nucleic acid molecules targeting HER2 (erbB2/neu) gene expression.

### SUMMARY OF THE INVENTION

[0012] The present invention features nucleic acid molecules, including, for example, antisense oligonucleotides, siRNA, aptamers, decoys and enzymatic nucleic acid molecules such as DNAzyme enzymatic nucleic acid molecules, which modulate expression of nucleic acid molecules encoding Ras oncogenes, such as K-Ras, H-Ras, and N-Ras. In one embodiment, the invention features an enzymatic nucleic acid molecule comprising a sequence selected from the group consisting of SEQ ID NOs: 2329-4655.

[0013] In another embodiment, the invention features an enzymatic nucleic acid molecule comprising at least one binding arm having a sequence complementary to a sequence selected from the group consisting of SEQ ID NOs: 1-2328.

[0014] In another embodiment, the invention features a siRNA molecule having complementarity to a sequence selected from the group consisting of SEQ ID NOs: 1-2328.

[0015] In another embodiment, the invention features an antisense molecule having complementarity to a sequence selected from the group consisting of SEQ ID NOs: 1-2328.

[0016] In another aspect of the invention, the nucleic acid of the invention is adapted to treat cancer.

[0017] In one embodiment, the enzymatic nucleic acid molecule of the invention has an endonuclease activity to cleave RNA having a K-Ras sequence.

[0018] In another embodiment, the enzymatic nucleic acid molecule of the invention has an endonuclease activity to cleave RNA having an H-Ras sequence.

[0019] In another embodiment, the enzymatic nucleic acid molecule of the invention has an endonuclease activity to cleave RNA having an N-Ras sequence.

[0020] In one embodiment, the siRNA molecule of the invention has RNA interference activity to K-Ras expression.

[0021] In another embodiment, the siRNA molecule of the invention has RNA interference activity to H-Ras expression.

[0022] In another embodiment, the siRNA molecule of the invention has RNA interference activity to N-Ras expression.

[0023] In one embodiment, a siRNA molecule of the invention comprises a double stranded RNA wherein one strand of the RNA is complementary to the RNA of K-Ras, H-Ras, and/or N-Ras gene. In another embodiment, a siRNA molecule of the invention comprises a double stranded RNA wherein one strand of the RNA comprises a portion of a sequence of RNA of K-Ras, H-Ras, and/or N-Ras gene sequence. In yet another embodiment, a siRNA molecule of the invention comprises a double stranded RNA wherein both strands of RNA are connected by a non-nucleotide linker. Alternately, a siRNA molecule of the invention comprises a double stranded RNA wherein both strands of RNA are connected by a nucleotide linker, such as a loop or stem loop structure.

[0024] In one embodiment, a single strand component of a siRNA molecule of the invention is from about 14 to about 50 nucleotides in length. In another embodiment, a single strand component of a siRNA molecule of the invention is about 14, 15, 16, 17, 18, 19, 20, 21, 22, 23, 24, 25, 26, 27, or 28 nucleotides in length. In yet another embodiment, a single strand component of a siRNA molecule of the invention is about 23 nucleotides in length. In one embodiment, a siRNA molecule of the invention is from about 28 to about 56 nucleotides in length. In another embodiment, a siRNA molecule of the invention is about 40, 41, 42, 43, 44, 45, 46, 47, 48, 49, 50, 51, or 52 nucleotides in length. In yet another embodiment, a siRNA molecule of the invention is about 46 nucleotides in length.

[0025] In one embodiment, the DNAzyme molecule of the invention is in a “10-23” configuration (see for example Santoro et al., 1997, PNAS, 94, 4262 and Joyce et al., U.S. Pat. No. 5,807,718). In another embodiment, the DNAzyme comprises a sequence complementary to a sequence selected from the group consisting of SEQ ID NOs: 1-2328. In yet another embodiment, the DNAzyme comprises a sequence selected from the group consisting of SEQ ID NOs: 2329-4655.

[0026] In another embodiment, the nucleic acid molecule of the invention comprises between 12 and 100 bases complementary to a nucleic acid molecule having a K-Ras sequence. In yet another embodiment, the enzymatic nucleic acid comprises between 14 and 24 bases complementary to a nucleic acid molecule having a K-Ras sequence.

[0027] In another embodiment, the nucleic acid molecule of the invention comprises between 12 and 100 bases complementary to a nucleic acid molecule having an H-Ras sequence. In yet another embodiment, the nucleic acid molecule of the invention comprises between 14 and 24 bases complementary to a nucleic acid molecule having an H-Ras sequence.

[0028] In another embodiment, the nucleic acid molecule of the invention comprises between 12 and 100 bases complementary to a nucleic acid molecule having an N-Ras sequence. In yet another embodiment, the nucleic acid molecule of the invention comprises between 14 and 24 bases complementary to a nucleic acid molecule having an N-Ras sequence.

[0029] In yet another embodiment, the nucleic acid molecule of the invention is chemically synthesized. The nucleic acid molecule can comprise at least one 2′-sugar modification, at least one nucleic acid base modification, and/or at least one phosphate backbone modification.

[0030] In one embodiment, the invention features a mammalian cell comprising the nucleic acid molecule of the invention. In another embodiment, the mammalian cell of the invention is a human cell.

[0031] In another embodiment, the invention features a method of modulating K-Ras activity in a cell, comprising contacting the cell with the nucleic acid molecule of the invention, under conditions suitable for the modulation of K-Ras activity.

[0032] In another embodiment, the invention features a method of modulating H-Ras activity in a cell, comprising contacting the cell with the nucleic acid molecule of the invention, under conditions suitable for the modulation of H-Ras activity.

[0033] In another embodiment, the invention features a method of modulating N-Ras activity in a cell, comprising contacting the cell with the nucleic acid molecule of the invention, under conditions suitable for the modulation of N-Ras activity.

[0034] In another embodiment, the invention features a method of treatment of a subject having a condition associated with the level of K-Ras, comprising contacting cells of the subject with the nucleic acid molecule of the invention, under conditions suitable for the treatment.

[0035] In another embodiment, the invention features a method of treatment of a subject having a condition associated with the level of H-Ras, comprising contacting cells of the subject with the nucleic acid molecule of the invention, under conditions suitable for the treatment.

[0036] In another embodiment, the invention features a method of treatment of a subject having a condition associated with the level of N-Ras, comprising contacting cells of the subject with the nucleic acid molecule of the invention, under conditions suitable for the treatment.

[0037] In one embodiment, a method of treatment of the invention further comprises the use of one or more drug therapies under conditions suitable for the treatment.

[0038] In another embodiment, the invention features a method of cleaving RNA having a K-Ras sequence comprising contacting the K-Ras RNA with the enzymatic nucleic acid molecule of the invention under conditions suitable for the cleavage, for example, where the cleavage is carried out in the presence of a divalent cation, such as Mg2+.

[0039] In another embodiment, the invention features a method of cleaving RNA having a H-Ras sequence comprising contacting the H-Ras RNA with the enzymatic nucleic acid molecule of the invention under conditions suitable for the cleavage, for example, where the cleavage is carried out in the presence of a divalent cation, such as Mg2+.

[0040] In another embodiment, the invention features a method of cleaving RNA having an N-Ras sequence comprising contacting the N-Ras RNA with the enzymatic nucleic acid molecule of the invention under conditions suitable for the cleavage, for example, where the cleavage is carried out in the presence of a divalent cation, such as Mg2+.

[0041] In one embodiment, the nucleic acid molecule of the invention comprises a cap structure, for example, a 3′,3′-linked or 5′,5′-linked deoxyabasic ribose derivative, wherein the cap structure is at the 5′-end, 3′-end, or both the 5′-end and the 3′-end of the nucleic acid molecule.

[0042] In another embodiment, the invention features an expression vector comprising a nucleic acid sequence encoding at least one nucleic acid molecule of the invention in a manner that allows expression of the nucleic acid molecule. For example, the invention features an expression vector comprising a nucleic acid encoding a DNAzyme in a manner that allows expression of the DNAzyme.

[0043] In yet another embodiment, the invention features a mammalian cell, for example a human cell, comprising an expression vector of the invention.

[0044] In another embodiment, the expression vector of the invention further comprises a sequence for a nucleic acid molecule complementary to an RNA having K-Ras sequence.

[0045] In another embodiment, the expression vector of the invention further comprises a sequence for a nucleic acid molecule complementary to an RNA having H-Ras sequence.

[0046] In another embodiment, the expression vector of the invention further comprises a sequence for a nucleic acid molecule complementary to an RNA having N-Ras sequence.

[0047] In one embodiment, an expression vector of the invention comprises a nucleic acid sequence encoding two or more nucleic acid molecules of the invention, which can be the same or different. In another embodiment, an expression vector of the invention further comprises a sequence encoding an antisense nucleic acid molecule complementary to an RNA having a K-Ras, H-Ras or N-Ras sequence.

[0048] In another embodiment, the invention features a method for treating cancer, for example colorectal cancer, bladder cancer, lung cancer, pancreatic cancer, breast cancer, or prostate cancer, comprising administering to a subject a nucleic acid molecule of the invention under conditions suitable for the treatment. A method of treatment of cancer of the invention can further comprise administering to a patient one or more other therapies, for example, monoclonal antibody therapy, such as Herceptin (trastuzumab); chemotherapy, such as paclitaxel (Taxol), docetaxel, cisplatin, methotrexate, cyclophosphamide, doxorubin, fluorouracil carboplatin, Leucovorin, Irinotecan (CAMPTOSAR® or CPT-11 or Camptothecin-11 or Campto), Carboplatin, edatrexate, gemcitabine, or vinorelbine; radiation therapy, or analgesic therapy and/or any combination thereof.

[0049] In another embodiment, the invention features a composition comprising a nucleic acid molecule of the invention in a pharmaceutically acceptable carrier.

[0050] In one embodiment, the invention features a method of administering to a cell, for example a mammalian cell or human cell, the nucleic acid molecule of the invention comprising contacting the cell with the nucleic acid molecule under conditions suitable for administration.

[0051] The method of administration can be in the presence of a delivery reagent, for example a lipid, cationic lipid, phospholipid, or liposome.

[0052] The present invention features an enzymatic nucleic acid molecule which modulates expression of a nucleic acid molecule encoding a human immunodeficiency virus (HIV), for example HIV-1, HIV-2, and related viruses such as FIV-1 and SIV-1, or a HIV gene, for example LTR, nef, vif, tat, or rev, wherein the enzymatic nucleic acid molecule comprises a DNAzyme configuration.

[0053] The invention also features an enzymatic nucleic acid molecule which modulates expression of a nucleic acid molecule encoding HIV or a component of HIV such as net, vif, tat, or rev, wherein the enzymatic nucleic acid molecule is in a Inozyme, G-cleaver, Zinzyme, DNAzyme or Amberzyme configuration.

[0054] The present invention also features a siRNA molecule which modulates expression of a nucleic acid molecule encoding a human immunodeficiency virus (HIV), for example HIV-1, HIV-2, and related viruses such as FIV-1 and SIV-1, or a HIV gene, for example LTR, nef, vif, tat, or rev.

[0055] The present invention features an enzymatic nucleic acid molecule comprising a sequence selected from the group consisting of SEQ ID NOs. 6727-6799. The invention also features an enzymatic nucleic acid molecule comprising at least one binding arm wherein one or more of said binding arms comprises a sequence complementary to a sequence selected from the group consisting of SEQ ID NOs. 6642-6726. In addition, the present invention features a siRNA nucleic acid molecule comprising sequence complementary to a sequence selected from the group consisting of SEQ ID NOs. 1-76 and 140-148.

[0056] In another embodiment, the siRNA molecule of the invention has RNA interference activity to HIV-1 expression and/or replication.

[0057] In one embodiment, a siRNA molecule of the invention comprises a double stranded RNA wherein one strand of the RNA is complementary to the RNA of HIV- 1 genome or genes. In another embodiment, a siRNA molecule of the invention comprises a double stranded RNA wherein one strand of the RNA comprises a portion of a sequence of HIV-1 genome or gene sequence. In yet another embodiment, a siRNA molecule of the invention comprises a double stranded RNA wherein both strands of RNA are connected by a non-nucleotide linker. Alternately, a siRNA molecule of the invention comprises a double stranded RNA wherein both strands of RNA are connected by a nucleotide linker, such as a loop or stem loop structure.

[0058] In one embodiment, a single strand component of a siRNA molecule of the invention is from about 14 to about 50 nucleotides in length. In another embodiment, a single strand component of a siRNA molecule of the invention is about 14, 15, 16, 17, 18, 19, 20, 21, 22, 23, 24, 25, 26, 27, or 28 nucleotides in length. In yet another embodiment, a single strand component of a siRNA molecule of the invention is about 23 nucleotides in length. In one embodiment, a siRNA molecule of the invention is from about 28 to about 56 nucleotides in length. In another embodiment, a siRNA molecule of the invention is about 40, 41, 42, 43, 44, 45, 46, 47, 48, 49, 50, 51, or 52 nucleotides in length. In yet another embodiment, a siRNA molecule of the invention is about 46 nucleotides in length.

[0059] In one embodiment, a nucleic acid molecule of the invention is adapted to treat HIV infection or acquired immunodeficiency syndrome (AIDS).

[0060] In another embodiment, the enzymatic nucleic acid molecule of the invention has an endonuclease activity to cleave RNA having HIV sequence.

[0061] In yet another embodiment, the enzymatic nucleic acid molecule of the invention is in an Inozyme, Zinzyme, G-cleaver, Amberzyme, DNAzyme or Hammerhead configuration.

[0062] In another embodiment, the Inozyme of the invention comprises a sequence complementary to a sequence selected from the group consisting of SEQ ID NOs. 6648-6655, or comprises a sequence selected from the group consisting of SEQ ID NOs. 6733-6740.

[0063] In another embodiment, the Zinzyme of the invention comprises a sequence complementary to a sequence selected from the group consisting of SEQ ID NOs. 6656-6663 and 6723-6726, or comprises a sequence selected from the group consisting of SEQ ID NOs 6741-6748 and 6795-6799.

[0064] In another embodiment, the Amberzyme of the invention comprises a sequence complementary to a sequence selected from the group consisting of SEQ ID NOs. 6656-6688, or comprises a sequence selected from the group consisting of SEQ ID NOs. 6762-6789.

[0065] In another embodiment, the DNAzyme of the invention comprises a sequence complementary to a sequence selected from the group consisting of SEQ ID NOs. 6656-6668 and 6718-6722, or comprises a sequence selected from the group consisting of SEQ ID NOs. 6749-6761 and 6790-6794.

[0066] In another embodiment, the Hammerhead of the invention comprises a sequence complementary to a sequence selected from the group consisting of SEQ ID NOs. 6642-6647, or comprises a sequence selected from the group consisting of SEQ ID NOs 6727-6732.

[0067] In one embodiment, a nucleic acid molecule of the invention comprises between 12 and 100 bases complementary to a RNA sequence encoding HIV genome, RNA, and/or proteins. In another embodiment, a nucleic acid molecule of the invention comprises between 14 and 24 bases complementary to a RNA sequence encoding HIV genome, RNA, and/or proteins.

[0068] In yet another embodiment, a nucleic acid molecule of the invention is chemically synthesized. A nucleic acid molecule of the invention can comprise at least one 2′-sugar modification, at least one nucleic acid base modification, and/or at least one phosphate backbone modification.

[0069] The present invention features a mammalian cell including a nucleic acid molecule of the invention. In one embodiment, the mammalian cell of the invention is a human cell.

[0070] The invention features a method of reducing HIV activity in a cell, comprising contacting the cell with a nucleic acid molecule of the invention, under conditions suitable for the reduction of HIV activity.

[0071] The invention also features a method of treating a subject having a condition associated with the level of HIV, comprising contacting cells of the subject with a nucleic acid molecule of the invention, under conditions suitable for the treatment.

[0072] In one embodiment, methods of treatment contemplated by the invention comprise the use of one or more drug therapies under conditions suitable for the treatment.

[0073] The invention features a method of cleaving RNA comprising a HIV nucleic acid sequence comprising contacting an enzymatic nucleic acid molecule of the invention with the RNA under conditions suitable for the cleavage. In one embodiment, the cleavage contemplated by the invention is carried out in the presence of a divalent cation, for example Mg²⁺.

[0074] The present invention features a method for treatment of acquired immunodeficiency syndrome (AIDS) or an AIDS related condition, for example Kaposi's sarcoma, lymphoma, cervical cancer, squamous cell carcinoma, cardiac myopathy, rheumatic disease, or opportunistic infection, comprising administering to a subject a nucleic acid molecule of the invention under conditions suitable for the treatment.

[0075] In one embodiment, nucleic acid molecule of the invention comprises at least five ribose residues, at least ten 2′-O-methyl modifications, and a 3′-end modification, for example a 3′-3′ inverted abasic moiety.

[0076] In another embodiment, a nucleic acid molecule of the invention further comprises phosphorothioate linkages on at least three of the 5′ terminal nucleotides.

[0077] In yet another embodiment, a DNAzyme of the invention comprises at least ten 2′-O-methyl modifications and a 3′-end modification, for example a 3′-3′ inverted abasic moiety. In a further embodiment, the DNAzyme of the invention further comprises phosphorothioate linkages on at least three of the 5′ terminal nucleotides.

[0078] In another embodiment, other drug therapies of the invention comprise antiviral therapy, monoclonal antibody therapy, chemotherapy, radiation therapy, analgesic therapy, or anti-inflammatory therapy.

[0079] In yet another embodiment, antiviral therapy of the invention comprises treatment with AZT, ddC, ddI, d4T, 3TC, Ribavirin, delvaridine, nevirapine, efravirenz, ritonavir, saquinivir, indinavir, amprenivir, nelfinavir, or lopinavir.

[0080] The invention features a composition comprising a nucleic acid molecule of the invention in a pharmaceutically acceptable carrier.

[0081] In one embodiment, the invention features a method of administering to a cell, for example a mammalian cell or human cell, an enzymatic nucleic acid molecule of the invention comprising contacting the cell with the enzymatic nucleic acid molecule under conditions suitable for the administration. The method of administration can be in the presence of a delivery reagent, for example a lipid, cationic lipid, phospholipid, or liposome.

[0082] The present invention features enzymatic nucleic acid molecules which modulate expression of nucleic acid molecules encoding HER2. The present invention also features siRNA molecules which modulate the expression of nucleic acid molecules encoding HER2.

[0083] In another embodiment, the invention features a siRNA molecule having complementarity to a sequence selected from the group consisting of SEQ ID NOs: 4656-5643 and 6632-6636.

[0084] In one embodiment, the invention features an enzymatic nucleic acid molecule comprising a sequence selected from the group consisting of SEQ ID NOs: 5644-6631 and 6637-6641.

[0085] In another embodiment, the invention features an enzymatic nucleic acid molecule comprising at least one binding arm having a sequence complementary to a sequence selected from the group consisting of SEQ ID NOs: 4656-5643 and 6632-6636.

[0086] In yet another embodiment, a nucleic acid of the invention is adapted to treat cancer.

[0087] In another embodiment, an enzymatic nucleic acid molecule of the invention has an endonuclease activity to cleave RNA having HER2 sequence.

[0088] In another embodiment, the siRNA molecule of the invention has RNA interference activity to N-Ras gene expression.

[0089] In one embodiment, a siRNA molecule of the invention comprises a double stranded RNA wherein one strand of the RNA is complementary to the RNA of HER2 gene. In another embodiment, a siRNA molecule of the invention comprises a double stranded RNA wherein one strand of the RNA comprises a portion of a sequence of RNA having of HER2 gene sequence. In yet another embodiment, a siRNA molecule of the invention comprises a double stranded RNA wherein both strands of RNA are connected by a non-nucleotide linker. Alternately, a siRNA molecule of the invention comprises a double stranded RNA wherein both strands of RNA are connected by a nucleotide linker, such as a loop or stem loop structure.

[0090] In one embodiment, a single strand component of a siRNA molecule of the invention is from about 14 to about 50 nucleotides in length. In another embodiment, a single strand component of a siRNA molecule of the invention is about 14, 15, 16, 17, 18, 19, 20, 21, 22, 23, 24, 25, 26, 27, or 28 nucleotides in length. In yet another embodiment, a single strand component of a siRNA molecule of the invention is about 23 nucleotides in length. In one embodiment, a siRNA molecule of the invention is from about 28 to about 56 nucleotides in length. In another embodiment, a siRNA molecule of the invention is about 40, 41, 42, 43, 44, 45, 46, 47, 48, 49, 50, 51, or 52 nucleotides in length. In yet another embodiment, a siRNA molecule of the invention is about 46 nucleotides in length.

[0091] In one embodiment, a DNAzyme molecule of the invention is in a “10-23” configuration. In another embodiment, a DNAzyme of the invention comprises a sequence complementary to a sequence having SEQ ID NOs: 4656-5643 and 6632-6636. In yet another embodiment, a DNAzyme molecule of the invention comprises a sequence having SEQ ID NOs: 5644-6631 and 6637-6641.

[0092] In another embodiment, a nucleic acid molecule of the invention comprises between 12 and 100 bases complementary to a nucleic acid molecule having HER2 sequence. In yet another embodiment, a nucleic acid molecule of the invention comprises between 14 and 24 bases complementary to a nucleic acid molecule having HER2 sequence.

[0093] In yet another embodiment, a nucleic acid molecule of the invention is chemically synthesized. A nucleic acid molecule of the invention can comprise at least one 2′-sugar modification, at least one nucleic acid base modification, and/or at least one phosphate backbone modification.

[0094] In one embodiment, the invention features a mammalian cell comprising a nucleic acid molecule of the invention. In another embodiment, the mammalian cell of the invention is a human cell.

[0095] In another embodiment, the invention features a method of reducing HER2 activity in a cell, comprising contacting the cell with the nucleic acid molecule of the invention, under conditions suitable for the reduction of HER2 activity.

[0096] In another embodiment, the invention features a method of treatment of a subject having a condition associated with the level of HER2, comprising contacting cells of the subject with the nucleic acid molecule of the invention, under conditions suitable for the treatment.

[0097] In one embodiment, a method of treatment of the invention further comprises the use of one or more drug therapies under conditions suitable for the treatment.

[0098] In another embodiment, the invention features a method of cleaving RNA having HER2 sequence comprising contacting an enzymatic nucleic acid molecule of the invention with the RNA under conditions suitable for the cleavage, for example, where the cleavage is carried out in the presence of a divalent cation, such as Mg2+.

[0099] In one embodiment, a nucleic acid molecule of the invention comprises a cap structure, for example a 3′,3′-linked or 5′,5′-linked deoxyabasic ribose derivative, wherein the cap structure is at the 5′-end, 3′-end, or both the 5′-end and the 3′-end of the enzymatic nucleic acid molecule.

[0100] In another embodiment, the invention features an expression vector comprising a nucleic acid sequence encoding at least one nucleic acid molecule of the invention, for example a DNAzyme or siRNA molecule, in a manner that allows expression of the nucleic acid molecule.

[0101] In yet another embodiment, the invention features a mammalian cell, for example a human cell, comprising an expression vector of the invention.

[0102] In another embodiment, an expression vector of the invention further comprises a sequence for a nucleic acid molecule complementary to a nucleic acid molecule having HER2 sequence.

[0103] In one embodiment, an expression vector of the invention comprises a nucleic acid sequence encoding two or more nucleic acid molecules, which can be the same or different. In another embodiment, an expression vector of the invention further comprises a sequence encoding an antisense nucleic acid molecule complementary to a nucleic acid molecule having a HER2 sequence.

[0104] In another embodiment, the invention features a method for treating cancer, for example breast cancer or ovarian cancer, comprising administering to a subject a nucleic acid molecule of the invention under conditions suitable for the treatment. A method of treatment of cancer of the invention can further comprise administering to a patient one or more other therapies, for example, monoclonal antibody therapy, such as Herceptin (trastuzumab); chemotherapy, such as paclitaxel (Taxol), docetaxel, cisplatin, methotrexate, cyclophosphamide, doxorubin, fluorouracil carboplatin, Leucovorin, Irinotecan (CAMPTOSAR® or CPT-11 or Camptothecin-11 or Campto), Carboplatin, edatrexate, gemcitabine, or vinorelbine; radiation therapy, or analgesic therapy and/or any combination thereof.

[0105] In another embodiment, the invention features a composition comprising a nucleic acid molecule of the invention in a pharmaceutically acceptable carrier.

[0106] In one embodiment, the invention features a method of administering to a cell, for example a mammalian cell or human cell, a nucleic acid molecule of the invention comprising contacting the cell with the nucleic acid molecule under conditions suitable for administration. The method of administration can be in the presence of a delivery reagent, for example a lipid, cationic lipid, phospholipid, or liposome.

### DETAILED DESCRIPTION OF THE INVENTION

[0107] First the drawings will be described briefly.

[0108] Drawings

[0109] FIG. 1 shows examples of chemically stabilized ribozyme motifs. HH Rz, represents hammerhead ribozyme motif (Usman et al., 1996, Curr. Op. Struct. Bio., 1, 527); NCH Rz represents the NCH ribozyme motif (Ludwig et al., International PCT Publication No. WO 98/58058 and U.S. patent application Ser. No. 08/878,640); G-Cleaver, represents G-cleaver ribozyme motif (Kore et al., 1998, Nucleic Acids Research 26, 4116-4120, Eckstein et al., U.S. Pat. No. 6,127,173). N or n, represent independently a nucleotide which can be same or different and have complementarity to each other; rI, represents ribo-Inosine nucleotide; arrow indicates the site of cleavage within the target. Position 4 of the HH Rz and the NCH Rz is shown as having 2′-C-allyl modification, but those skilled in the art will recognize that this position can be modified with other modifications well known in the art, so long as such modifications do not significantly inhibit the activity of the ribozyme.

[0110] FIG. 2 shows an example of the Amberzyme ribozyme motif that is chemically stabilized (see for example Beigelman et al., International PCT publication No. WO 99/55857 and U.S. patent application Ser. No. 09/476,387.).

[0111] FIG. 3 shows an example of a Zinzyme A ribozyme motif that is chemically stabilized (see for example Beigelman et al., International PCT publication No. WO 99/55857 and U.S. patent application Ser. No. 09/918,728).

[0112] FIG. 4 shows an example of a DNAzyme motif described by Santoro et al., 1997, PNAS, 94, 4262 and Joyce et al., U.S. Pat. No. 5,807,718 .

[0113] The invention features novel nucleic acid molecules, including antisense oligonucleotides, siRNA and enzymatic nucleic acid molecules, and methods to modulate gene expression, for example, genes encoding K-Ras, H-Ras and/or N-Ras. In particular, the instant invention features nucleic-acid based molecules and methods to down-regulate the expression of K-Ras, H-Ras and/or N-Ras gene sequences.

[0114] The invention features one or more nucleic acid-based molecules and methods that independently or in combination modulate the expression of a gene or genes encoding Ras proteins. In particular embodiments, the invention features nucleic acid-based molecules and methods that modulate the expression of K-Ras gene, for example, Genbank Accession No. NM_{—}004985; H-Ras gene, for example, Genbank Accession No. NM_{—}005343; and/or N-Ras gene, for example, Genbank Accession No. NM_{—}002524.

[0115] The description below of the various aspects and embodiments is provided with reference to exemplary K-Ras, H-Ras, and N-Ras genes, referred to hereinafter collectively as Ras. However, the various aspects and embodiments are directed to equivalent sequences and also to other genes which encode K-Ras, H-Ras and/or N-Ras proteins and similar proteins to K-Ras, H-Ras and/or N-Ras. For example, the invention relates to genes with homology to genes that encode K-Ras, H-Ras and/or N-Ras and genes that encode proteins with similar function to K-Ras, H-Ras, and N-Ras proteins. Those additional genes can be analyzed for target sites using the methods described herein. Thus, the modulation and the effects of such modulation of the other genes can be determined as described herein.

[0116] In one embodiment, the invention features the use of an enzymatic nucleic acid molecule, preferably in the hammerhead, NCH, G-cleaver, amberzyme, zinzyme and/or DNAzyme motif, to modulate the expression of a Ras gene or inhibit Ras activity. In one embodiment, the invention features the use of these enzymatic nucleic acid molecules to down-regulate the expression of a Ras gene or inhibit Ras activity. In another embodiment, the invention features the use of an antisense oligonucleotide molecule to modulate, for example, down-regulate, the expression of a Ras gene or inhibit Ras activity.

[0117] The invention features novel enzymatic nucleic acid molecules, siRNA molecules, and methods to modulate expression and/or activity of human immunodeficiency virus (HIV), for example HIV-1, HIV-2, and related viruses such as FIV-1 and SIV-1, or a HIV gene, for example LTR, nef, vif tat, or rev. In particular, the instant invention features nucleic-acid based molecules and methods to inhibit the replication of a HIV or related virus.

[0118] The invention features one or more nucleic acid-based molecules and methods that independently or in combination modulate the expression of gene(s) encoded by HIV and/or inhibit the replication of HIV. In particular embodiments, the invention features nucleic acid-based molecules and methods that modulate the expression of HIV-1 encoded genes, for example (Genbank Accession No. AJ302647); HIV-2 gene, for example (Genbank Accession No. NC_{—}001722), FIV-1, for example (Genbank Accession No. NC_{—}001482), SIV-1, for example (Genbank Accession No. M66437), LTR, for example included in (Genbank Accession No. AJ302647), nef, for example included in (Genbank Accession No. AJ302647), vif for example included in (Genbank Accession No. AJ302647), tat, for example included in (Genbank Accession No. AJ302647), and rev, for example included in (Genbank Accession No. AJ302647).

[0119] The description below of the various aspects and embodiments is provided with reference to the exemplary HIV-1 gene, referred to herein as HIV. However, the various aspects and embodiments are also directed to other genes which encode HIV proteins and similar viruses to HIV. Those additional genes can be analyzed for target sites using the methods described for HIV. Thus, the inhibition and the effects of such inhibition of the other genes can be performed as described herein.

[0120] Due to the high sequence variability of the HIV genome, selection of nucleic acid molecules for broad therapeutic applications would likely involve the conserved regions of the HIV genome. Specifically, the present invention describes nucleic acid molecules that cleave the conserved regions of the HIV genome. Therefore, one nucleic acid molecule can be designed to cleave all the different isolates of HIV. Nucleic acid molecules designed against conserved regions of various HIV isolates can enable efficient inhibition of HIV replication in diverse subject populations and can ensure the effectiveness of the nucleic acid molecules against HIV quasi species which evolve due to mutations in the non-conserved regions of the HIV genome.

[0121] In one embodiment, the invention features the use of an enzymatic nucleic acid molecule, preferably in the hammerhead, NCH, G-cleaver, amberzyme, zinzyme and/or DNAzyme motif, to down-regulate the expression of HIV genes or inhibit the replication of HIV.

[0122] The invention features novel nucleic acid molecules, siRNA molecules and methods to modulate gene expression, for example, genes encoding HER2. In particular, the instant invention features nucleic-acid based molecules and methods to inhibit the expression of HER2.

[0123] The invention features one or more nucleic acid-based molecules and methods that independently or in combination modulate the expression of a gene or genes encoding HER2. In particular embodiments, the invention features nucleic acid-based molecules and methods that modulate the expression of HER2 gene, for example, Genbank Accession No. NM_{—}004448.

[0124] The description below of the various aspects and embodiments is provided with reference to an exemplary HER2 gene, referred to herein as HER2 but also known as ERB2, ERB-B2, NEU, NGL, and v-ERB-B2. However, the various aspects and embodiments are also directed to other genes which encode HER2 proteins and similar proteins to HER2. Those additional genes can be analyzed for target sites using the methods described for HER2. Thus, the inhibition and the effects of such inhibition of the other genes can be performed as described herein.

[0125] In one embodiment, the invention features the use of an enzymatic nucleic acid molecule, preferably in the hammerhead, NCH, G-cleaver, amberzyme, zinzyme and/or DNAzyme motif, to down-regulate the expression of HER2 genes or inhibit HER2 activity.

[0126] By “modulate” is meant that the expression of the gene, or level of RNAs or equivalent RNAs encoding one or more protein subunits or components, or activity of one or more proteins is up-regulated or down-regulated, such that the expression, level, or activity is greater than or less than that observed in the absence of the nucleic acid molecules of the invention.

[0127] By “inhibit” or “down-regulate” it is meant that the expression of the gene, or level of RNAs or equivalent RNAs encoding one or more protein subunits or components, or activity of one or more protein subunits or components, such as Ras, HIV, and/or HER2 protein or proteins, is reduced below that observed in the absence of the nucleic acid molecules of the invention. In one embodiment, inhibition or down-regulation with the enzymatic nucleic acid molecule preferably is below that level observed in the presence of an enzymatically inactive or attenuated enzymatic nucleic acid molecule that is able to bind to the same site on the target RNA, but is unable to cleave that RNA. In another embodiment, inhibition or down-regulation with an antisense oligonucleotide is preferably below that level observed in the presence of, for example, an oligonucleotide with scrambled sequence or with mismatches. In another embodiment, inhibition or down-regulation with an siRNA molecule is preferably below that level observed in the presence of, for example, an oligonucleotide with scrambled sequence or with mismatches. In another embodiment, inhibition or down-regulation of Ras, HIV, or HER2 expression and/or activity with the nucleic acid molecule of the instant invention is greater in the presence of the nucleic acid molecule than in its absence.

[0128] By “up-regulate” is meant that the expression of the gene, or level of RNAs or equivalent RNAs encoding one or more protein subunits or components, or activity of one or more protein subunits or components, such as Ras, HIV, or HER2 protein or proteins, is greater than that observed in the absence of the nucleic acid molecules of the invention. For example, the expression of a gene, such as Ras, HIV, or HER2 gene, can be increased in order to treat, prevent, ameliorate, or modulate a pathological condition caused or exacerbated by an absence or low level of gene expression.

[0129] By “enzymatic nucleic acid molecule” as used herein, is meant a nucleic acid molecule which has complementarity in a substrate binding region to a specified gene target, and also has an enzymatic activity which is active to specifically cleave target RNA. That is, the enzymatic nucleic acid molecule is able to intermolecularly cleave RNA and thereby inactivate a target RNA molecule. These complementary regions allow sufficient hybridization of the enzymatic nucleic acid molecule to the target RNA and thus permit cleavage. One hundred percent complementarity is preferred, but complementarity as low as 50-75% can also be useful in this invention (see for example Werner and Uhlenbeck, 1995, Nucleic Acids Research, 23, 2092-2096; Hammann et al., 1999, Antisense and Nucleic Acid Drug Dev., 9, 25-31). The nucleic acids can be modified at the base, sugar, and/or phosphate groups. The term DNAzyme-based enzymatic nucleic acid is used interchangeably with phrases such as catalytic DNA, aptazyme or aptamer-binding DNAzyme, regulatable DNAzyme, catalytic oligonucleotides, nucleozyme, DNAzyme, endoribonuclease, endonuclease, minizyme, leadzyme, oligozyme or DNA enzyme. All of these terminologies describe nucleic acid molecules with enzymatic activity. The specific enzymatic nucleic acid molecules described in the instant application are not limiting in the invention and those skilled in the art will recognize that all that is important in an enzymatic nucleic acid molecule of this invention is that it have a specific substrate binding site which is complementary to one or more of the target nucleic acid regions, and that it have nucleotide sequences within or surrounding that substrate binding site which impart a nucleic acid cleaving and/or ligation activity to the molecule.

[0130] By “nucleic acid molecule” as used herein is meant a molecule having nucleotides. The nucleic acid can be single, double, or multiple stranded and can comprise modified or unmodified nucleotides or non-nucleotides or various mixtures and combinations thereof

[0131] By “enzymatic portion” or “catalytic domain” is meant that portion/region of the enzymatic nucleic acid molecule essential for cleavage of a nucleic acid substrate (for example see FIGS. 1-4).

[0132] By “substrate binding arm” or “substrate binding domain” is meant that portion/region of a enzymatic nucleic acid which is able to interact, for example via complementarity (i.e., able to base-pair with), with a portion of its substrate. Preferably, such complementarity is 100%, but can be less if desired. For example, as few as 10 bases out of 14 can be base-paired (see for example Werner and Uhlenbeck, 1995, Nucleic Acids Research, 23, 2092-2096; Hammann et al., 1999, Antisense and Nucleic Acid Drug Dev., 9, 25-31). Examples of such arms are shown generally in FIGS. 1-3. That is, these arms contain sequences within a enzymatic nucleic acid which are intended to bring enzymatic nucleic acid and target RNA together through complementary base-pairing interactions. The enzymatic nucleic acid of the invention can have binding arms that are contiguous or non-contiguous and can be of varying lengths. The length of the binding arm(s) are preferably greater than or equal to four nucleotides and of sufficient length to stably interact with the target RNA; preferably 12-100 nucleotides; more preferably 14-24 nucleotides long (see for example Werner and Uhlenbeck, supra; Hamman et al., supra, Hampel et al., EP0360257; Berzal-Herranz et al., 1993, EMBO J., 12, 2567-73). If two binding arms are chosen, the design is such that the length of the binding arms are symmetrical (i.e., each of the binding arms is of the same length; e.g., five and five nucleotides, or six and six nucleotides, or seven and seven nucleotides long) or asymmetrical (i.e., the binding arms are of different length; e.g., six and three nucleotides; three and six nucleotides long; four and five nucleotides long; four and six nucleotides long; four and seven nucleotides long; and the like).

[0133] By “Inozyme” or “NCH” motif or configuration is meant, an enzymatic nucleic acid molecule comprising a motif as is generally described as NCH Rz in FIG. 1 and in Ludwig et al., International PCT Publication No. WO 98/58058 and U.S. patent application Ser. No. 08/878,640. Inozymes possess endonuclease activity to cleave nucleic acid substrates having a cleavage triplet NCH/, where N is a nucleotide, C is cytidine and H is adenosine, uridine or cytidine, and “/” represents the cleavage site. H is used interchangeably with X. Inozymes can also possess endonuclease activity to cleave nucleic acid substrates having a cleavage triplet NCN/, where N is a nucleotide, C is cytidine, and “/” represents the cleavage site. “I” in FIG. 1 represents an Inosine nucleotide, preferably a ribo-Inosine or xylo-Inosine nucleoside.

[0134] By “G-cleaver” motif or configuration is meant, an enzymatic nucleic acid molecule comprising a motif as is generally described as G-cleaver Rz in FIG. 1 and in Eckstein et al., U.S. Pat. No. 6,127,173. G-cleavers possess endonuclease activity to cleave nucleic acid substrates having a cleavage triplet NYN/, where N is a nucleotide, Y is uridine or cytidine and “/” represents the cleavage site. G-cleavers can be chemically modified as is generally shown in FIG. 1.

[0135] By “amberzyme” motif or configuration is meant, an enzymatic nucleic acid molecule comprising a motif as is generally described in FIG. 2 and in Beigelman et al., International 30 PCT publication No. WO 99/55857 and U.S. patent application Ser. No. 09/476,387. Amberzymes possess endonuclease activity to cleave nucleic acid substrates having a cleavage triplet NG/N, where N is a nucleotide, G is guanosine, and “/” represents the cleavage site. Amberzymes can be chemically modified to increase nuclease stability through substitutions as are generally shown in FIG. 2. In addition, differing nucleoside and/or non-nucleoside linkers can be used to substitute the 5′-gaaa-3′ loops shown in the figure. Amberzymes represent a non-limiting example of an enzymatic nucleic acid molecule that does not require a ribonucleotide (2′-OH) group within its own nucleic acid sequence for activity.

[0136] By “zinzyme” motif or configuration is meant, an enzymatic nucleic acid molecule comprising a motif as is generally described in FIG. 3 and in Beigelman et al., International PCT publication No. WO 99/55857 and U.S. patent application Ser. No. 09/918,728. Zinzymes possess endonuclease activity to cleave nucleic acid substrates having a cleavage triplet including but not limited to YG/Y, where Y is uridine or cytidine, and G is guanosine and “/” represents the cleavage site. Zinzymes can be chemically modified to increase nuclease stability through substitutions as are generally shown in FIG. 3, including substituting 2′-O-methyl guanosine nucleotides for guanosine nucleotides. In addition, differing nucleotide and/or non-nucleotide linkers can be used to substitute the 5′-gaaa-2′ loop shown in the figure. Zinzymes represent a non-limiting example of an enzymatic nucleic acid molecule that does not require a ribonucleotide (2′-OH) group within its own nucleic acid sequence for activity.

[0137] By ‘DNAzyme’ is meant, an enzymatic nucleic acid molecule that does not require the presence of a 2′-OH group within its own nucleic acid sequence for activity. In particular embodiments the enzymatic nucleic acid molecule can have an attached linker or linkers or other attached or associated groups, moieties, or chains containing one or more nucleotides with 2′-OH groups. DNAzymes can be synthesized chemically or expressed endogenously in vivo, by means of a single stranded DNA vector or equivalent thereof. An example of a DNAzyme is shown in FIG. 4 and is generally reviewed in Usman et al., U.S. Pat. No. 6,159,714; Chartrand et al., 1995, NAR 23, 4092; Breaker et al., 1995, Chem. Bio. 2, 655; Santoro et al., 1997, PNAS 94, 4262; Breaker, 1999, Nature Biotechnology, 17, 422-423; and Santoro et. al., 2000, J. Am. Chem. Soc., 122, 2433-39. The “10-23” DNAzyme motif is one particular type of DNAzyme that was evolved using in vitro selection, see Santoro et al., supra and as generally described in Joyce et al., U.S. Pat. No. 5,807,718. Additional DNAzyme motifs can be selected by using techniques similar to those described in these references, and hence, are within the scope of the present invention. DNAzymes of the invention can comprise nucleotides modified at the nucleic acid base, sugar, or phosphate backbone. Non-limiting examples of sugar modifications that can be used in DNAzymes of the invention include 2′-O-alkyl modifications such as 2′-O-methyl or 2′-O-allyl, 2′-C-alkyl modifications such as 2′-C-allyl, 2′-deoxy-2′-amino, 2′-halo modifications such as 2′-fluoro, 2′-chloro, or 2′-bromo, isomeric modifications such as arabinofuranose or xylofuranose based nucleic acids, and other sugar modifications such as 4′-thio or 4′-carbocyclic nucleic acids. Non-limiting examples of nucleic acid based modifications that can be used in DNAzymes of the invention include modified purine heterocycles, G-clamp heterocycles, and various modified pyrimidine cycles. Non-limiting examples of backbone modifications that can be used in DNAzymes of the invention include phosphorothioate, phosphorodithioate, phosphoramidate, and methylphosphonate internucleotide linkages. DNAzymes of the invention can comprise naturally occurring nucleic acids, chimeras of chemically modified and naturally occurring nucleic acids, or completely modified nucleic acids.

[0138] In general, enzymatic nucleic acids act by first binding to a target RNA. Such binding occurs through the target binding portion of a enzymatic nucleic acid that is held in close proximity to an enzymatic portion of the molecule that acts to cleave the target RNA. Thus, the enzymatic nucleic acid first recognizes and then binds a target RNA through complementary base-pairing, and once bound to the correct site, acts enzymatically to cut the target RNA. Strategic cleavage of such a target RNA will destroy its ability to direct synthesis of an encoded protein. After an enzymatic nucleic acid has bound and cleaved its RNA target, it is released from that RNA to search for another target and can repeatedly bind and cleave new targets. Thus, a single enzymatic nucleic acid molecule is able to cleave many molecules of target RNA. In addition, the enzymatic nucleic acid molecule is a highly specific inhibitor of gene expression, with the specificity of inhibition depending not only on the base-pairing mechanism of binding to the target RNA, but also on the mechanism of target RNA cleavage. Single mismatches, or base-substitutions, near the site of cleavage can completely eliminate catalytic activity of an enzymatic nucleic acid molecule.

[0139] By “sufficient length” is meant an oligonucleotide of greater than or equal to 3 nucleotides that is of a length great enough to provide the intended function under the expected condition. For example, for binding arms of enzymatic nucleic acid “sufficient length” means that the binding arm sequence is long enough to provide stable binding to a target site under the expected binding conditions. Preferably, the binding arms are not so long as to prevent useful turnover of the nucleic acid molecule.

[0140] By “stably interact” is meant interaction of oligonucleotides with target nucleic acid molecules (e.g., by forming hydrogen bonds with complementary nucleotides in the target under physiological conditions) that is sufficient to the intended purpose (e.g., cleavage of target RNA by an enzyme).

[0141] By “equivalent” RNA to Ras is meant to include those naturally occurring RNA molecules having homology (partial or complete) to Ras nucleic acids or encoding for proteins with similar function as Ras proteins in various organisms, including humans, rodents, primates, rabbits, pigs, protozoans, fungi, plants, and other microorganisms and parasites. The equivalent RNA sequence can also include, in addition to the coding region, regions such as a 5′-untranslated region, a 3′-untranslated region, introns, a intron-exon junction and the like.

[0142] By “equivalent” RNA to HIV is meant to include those naturally occurring RNA molecules having homology (partial or complete) to HIV nucleic acids or encoding for proteins with similar function as HIV proteins in various organisms, including human, rodent, primate, rabbit, pig, protozoans, fungi, plants, and other microorganisms and parasites. The equivalent RNA sequence also includes in addition to the coding region, regions such as 5′-untranslated region, 3′-untranslated region, introns, intron-exon junction and the like.

[0143] By “equivalent” RNA to HER2 is meant to include those naturally occurring RNA molecules having homology (partial or complete) to HER2 nucleic acids or encoding for proteins with similar function as HER2 proteins in various organisms, including humans, rodents, primates, rabbits, pigs, protozoans, fungi, plants, and other microorganisms and parasites. The equivalent RNA sequence also includes, in addition to the coding region, regions such as a 5′-untranslated region, a 3′-untranslated region, introns, a intron-exon junction and the like.

[0144] By “homology” is meant the nucleotide sequence of two or more nucleic acid molecules is partially or completely identical.

[0145] By “component” of HIV is meant a peptide or protein expressed from an HIV gene, for example nef vif tat, or rev viral gene products.

[0146] By “component” of HER2 is meant a peptide or protein subunit expressed from a HER2 gene.

[0147] By “component” of Ras is meant a peptide or protein subunit expressed from a Ras gene.

[0148] By “gene” it is meant a nucleic acid that encodes an RNA, for example, nucleic acid sequences including but not limited to structural genes encoding a polypeptide.

[0149] “Complementarity” refers to the ability of a nucleic acid to form hydrogen bond or bonds with another RNA sequence by either traditional Watson-Crick or other non-traditional types. In reference to the nucleic molecules of the present invention, the binding free energy for a nucleic acid molecule with its target or complementary sequence is sufficient to allow the relevant function of the nucleic acid to proceed, e.g., enzymatic nucleic acid cleavage, antisense or triple helix inhibition. Determination of binding free energies for nucleic acid molecules is well known in the art (see, e.g., Turner et al., 1987, CSH Symp. Quant. Biol. LII pp.123-133; Frier et al., 1986, Proc. Nat. Acad. Sci. USA 83:9373-9377; Turner et al., 1987, J. Am. Chem. Soc. 109:3783-3785). A percent complementarity indicates the percentage of contiguous residues in a nucleic acid molecule that can form hydrogen bonds (e.g., Watson-Crick base pairing) with a second nucleic acid sequence (e.g., 5, 6, 7, 8, 9, 10 out of 10 being 50%, 60%, 70%, 80%, 90%, and 100% complementary). “Perfectly complementary” means that all the contiguous residues of a nucleic acid sequence will hydrogen bond with the same number of contiguous residues in a second nucleic acid sequence.

[0150] By “RNA” is meant a molecule comprising at least one ribonucleotide residue. By “ribonucleotide” or “2′-OH” is meant a nucleotide with a hydroxyl group at the 2′ position of a β-D-ribo-furanose moiety. By “decoy” is meant a nucleic acid molecule, for example RNA or DNA, or aptamer that is designed to preferentially bind to a predetermined ligand. Such binding can result in the inhibition or activation of a target molecule. A decoy or aptamer can compete with a naturally occurring binding target for the binding of a specific ligand. For example, it has been shown that over-expression of HIV trans-activation response (TAR) RNA can act as a “decoy” and efficiently binds HIV tat protein, thereby preventing it from binding to TAR sequences encoded in the HIV RNA (Sullenger et al., 1990, Cell, 63, 601-608). This is but a specific example and those in the art will recognize that other embodiments can be readily generated using techniques generally known in the art, see for example Gold et al., 1995, Annu. Rev. Biochem., 64, 763; Brody and Gold, 2000, J. Biotechnol., 74, 5; Sun, 2000, Curr. Opin. Mol. Ther., 2, 100; Kusser, 2000, J. Biotechnol., 74, 27; Hermann and Patel, 2000, Science, 287, 820; and Jayasena, 1999, Clinical Chemistry, 45, 1628. Similarly, a decoy can be designed to bind to Ras and block the binding of Ras or a decoy can be designed to bind to Ras and prevent interaction with the Ras protein.

[0151] By “aptamer” or “nucleic acid aptamer” as used herein is meant a nucleic acid molecule that binds specifically to a target molecule wherein the nucleic acid molecule has sequence that is distinct from sequence recognized by the target molecule in its natural setting. Alternately, an aptamer can be a nucleic acid molecule that binds to a target molecule where the target molecule does not naturally bind to a nucleic acid. The target molecule can be any molecule of interest. For example, the aptamer can be used to bind to a ligand binding domain of a protein, thereby preventing interaction of the naturally occurring ligand with the protein. Similarly, the nucleic acid molecules of the instant invention can bind to RAS, Her-2 or HIV encoded RNA or proteins receptors to block activity of the activity of target protein or nucleic acid. This is a non-limiting example and those in the art will recognize that other embodiments can be readily generated using techniques generally known in the art, see for example Gold et al., U.S. Pat. Nos. 5,475,096 and 5,270,163; Gold et al., 1995, Annu. Rev. Biochem., 64, 763; Brody and Gold, 2000, J. Biotechnol., 74, 5; Sun, 2000, Curr. Opin. Mol. Ther., 2, 100; Kusser, 2000, J. Biotechnol., 74, 27; Hermann and Patel, 2000, Science, 287, 820; and Jayasena, 1999, Clinical Chemistry, 45, 1628.

[0152] The term “short interfering RNA” or “siRNA” as used herein refers to a double stranded nucleic acid molecule capable of RNA interference “RNAi”, see for example Bass, 2001, Nature, 411, 428-429; Elbashir et al., 2001, Nature, 411, 494-498; and Kreutzer et al., International PCT Publication No. WO 00/44895; Zernicka-Goetz et al., International PCT Publication No. WO 01/36646; Fire, International PCT Publication No. WO 99/32619; Plaetinck et al., International PCT Publication No. WO 00/01846; Mello and Fire, International PCT Publication No. WO 01/29058; Deschamps-Depaillette, International PCT Publication No. WO 99/07409; and Li et al., International PCT Publication No. WO 00/44914. As used herein, siRNA molecules need not be limited to those molecules containing only RNA, but further encompasses chemically modified nucleotides and non-nucleotides.

[0153] Nucleic acid molecules that modulate expression of Ras-specific RNAs represent a therapeutic approach to treat cancer, including, but not limited to colorectal cancer, bladder cancer, lung cancer, pancreatic cancer, breast cancer, or prostate cancer and any other cancer, disease or condition that responds to the modulation of Ras expression.

[0154] Nucleic acid molecules that modulate expression of HIV-specific RNAs also represent a therapeutic approach to treat acquired immunodeficiency syndrome (AIDS) and/or any other disease, condition, or syndrome which respond to the modulation of HIV expression.

[0155] Nucleic acid molecules that modulate expression of HER2-specific RNAs represent a therapeutic approach to treat cancer, including, but not limited to breast and ovarian cancer and any other cancer, disease or condition that responds to the modulation of HER2 expression.

[0156] In one embodiment of the inventions described herein, the enzymatic nucleic acid molecule is formed in a hammerhead or hairpin motif, but can also be formed in the motif of a hepatitis delta virus, group I intron, group II intron or RNase P RNA (in association with an RNA guide sequence), Neurospora VS RNA, DNAzymes, NCH cleaving motifs, or G-cleavers. Examples of such hammerhead motifs are described by Dreyfus, supra, Rossi et al., 1992, AIDS Research and Human Retroviruses 8, 183; of hairpin motifs by Hampel et al., EP0360257, Hampel and Tritz, 1989 Biochemistry 28, 4929, Feldstein et al., 1989, Gene 82, 53, Haseloff and Gerlach, 1989, Gene, 82, 43, and Hampel et al., 1990 Nucleic Acids Res. 18, 299; Chowrira & McSwiggen, U.S. Pat. No. 5,631,359; of the hepatitis delta virus motif is described by Perrotta and Been, 1992 Biochemistry 31, 16; of the RNase P motif by Guerrier-Takada et al., 1983 Cell 35, 849; Forster and Altman, 1990, Science 249, 783; Li and Altman, 1996, Nucleic Acids Res. 24, 835; Neurospora VS RNA ribozyme motif is described by Collins (Saville and Collins, 1990 Cell 61, 685-696; Saville and Collins, 1991 Proc. Natl. Acad. Sci. USA 88, 8826-8830; Collins and Olive, 1993 Biochemistry 32, 2795-2799; Guo and Collins, 1995, EMBO. J. 14, 363); Group II introns are described by Griffin et al., 1995, Chem. Biol. 2, 761; Michels and Pyle, 1995, Biochemistry 34, 2965; Pyle et al., International PCT Publication No. WO 96/22689; of the Group I intron by Cech et al., U.S. Pat. No. 4,987,071 and of DNAzymes by Usman et al., International PCT Publication No. WO 95/11304; Chartrand et al., 1995, NAR 23, 4092; Breaker et al., 1995, Chem. Bio. 2, 655; Santoro et al., 1997, PNAS 94, 4262, and Beigelman et al., International PCT publication No. WO 99/55857. NCH cleaving motifs are described in Ludwig & Sproat, International PCT Publication No. WO 98/58058; and G-cleavers are described in Kore et al., 1998, Nucleic Acids Research 26, 4116-4120 and Eckstein et al., International PCT Publication No. WO 99/16871. Additional motifs such as the Aptazyme (Breaker et al., WO 98/43993), Amberzyme (Class I motif; FIG. 2; Beigelman et al., U.S. Ser. No. 09/301,511) and Zinzyme (FIG. 3) (Beigelman et al., U.S. Ser. No. 09/301,511), all included by reference herein including drawings, can also be used in the present invention. These specific motifs or configurations are not limiting in the invention and those skilled in the art will recognize that all that is important in an enzymatic nucleic acid molecule of this invention is that it has a specific substrate binding site which is complementary to one or more of the target gene RNA regions, and that it have nucleotide sequences within or surrounding that substrate binding site which impart an RNA cleaving activity to the molecule (Cech et al., U.S. Pat. No. 4,987,071).

[0157] In one embodiment of the present invention, a nucleic acid molecule of the instant invention can be between about 10 and 100 nucleotides in length. Exemplary enzymatic nucleic acid molecules of the invention are shown in the Tables herein. For example, enzymatic nucleic acid molecules of the invention are preferably between about 15 and 50 nucleotides in length, more preferably between about 25 and 40 nucleotides in length, e.g., 34, 36, or 38 nucleotides in length (for example see Jarvis et al., 1996, J. Biol. Chem., 271, 29107-29112). Exemplary DNAzymes of the invention are preferably between about 15 and 40 nucleotides in length, more preferably between about 25 and 35 nucleotides in length, e.g., 29, 30, 31, or 32 nucleotides in length (see for example Santoro et al., 1998, Biochemistry, 37, 13330-13342; Chartrand et al., 1995, Nucleic Acids Research, 23, 4092-4096). Exemplary antisense molecules of the invention are preferably between about 15 and 75 nucleotides in length, more preferably between about 20 and 35 nucleotides in length, e.g., 25, 26, 27, or 28 nucleotides in length (see for example Woolf et al., 1992, PNAS., 89, 7305-7309; Milner et al., 1997, Nature Biotechnology, 15, 537-541). Exemplary triplex forming oligonucleotide molecules of the invention are preferably between about 10 and 40 nucleotides in length, more preferably between about 12 and 25 nucleotides in length, e.g., 18, 19, 20, or 21 nucleotides in length (see for example Maher et al., 1990, Biochemistry, 29, 8820-8826; Strobel and Dervan, 1990, Science, 249, 73-75). Those skilled in the art will recognize that all that is required is for a nucleic acid molecule to be of length and conformation sufficient and suitable for the nucleic acid molecule to interact with its target and/or catalyze a reaction contemplated herein. The length of nucleic acid molecules of the instant invention are not limiting within the general limits stated.

[0158] Preferably, a nucleic acid molecule that modulates, for example, down-regulates Ras, HIV, and/or HER2 expression and/or activity, comprises between 12 and 100 bases complementary to a RNA molecule of Ras, HIV, and/or HER2 respectively. Even more preferably, a nucleic acid molecule that modulates Ras, HIV, and/or HER2 expression comprises between 14 and 24 bases complementary to a RNA molecule of Ras, HIV, and/or HER2 respectively.

[0159] The invention provides a method for producing a class of nucleic acid-based gene modulating agents that exhibit a high degree of specificity for RNA of a desired target. For example, an enzymatic nucleic acid molecule is preferably targeted to a highly conserved sequence region of target RNAs encoding Ras (and specifically a Ras gene) such that specific treatment of a disease or condition can be provided with either one or several nucleic acid molecules of the invention. Such nucleic acid molecules can be delivered exogenously to specific tissue or cellular targets as required. Alternatively, the nucleic acid molecules (e.g., enzymatic nucleic acid molecules, siRNA, antisense, and/or DNAzymes) can be expressed from DNA and/or RNA vectors that are delivered to specific cells.

[0160] As used herein “cell” is used in its usual biological sense, and does not refer to an entire multicellular organism. A cell can, for example, be in vitro, e.g., in cell culture, or present in a multicellular organism, including, e.g., birds, plants and mammals such as humans, cows, sheep, apes, monkeys, swine, dogs, and cats. The cell can be prokaryotic (e.g., bacterial cell) or eukaryotic (e.g., mammalian or plant cell).

[0161] By “Ras proteins” is meant, a peptide or protein comprising Ras tyrosine kinase-type cell surface receptor or a peptide or protein encoded by a Ras gene, such as K-Ras, H-Ras, or N-Ras.

[0162] By “HIV proteins” is meant, a peptide or protein comprising a component of HIV or a peptide or protein encoded by a HIV gene.

[0163] By “HER2 proteins” is meant, a peptide or protein comprising HER2/ERB2/NEU tyrosine kinase-type cell surface receptor or a peptide or protein encoded by a HER2/ERB2/NEU gene.

[0164] By “highly conserved sequence region” is meant, a nucleotide sequence of one or more regions in a target gene that does not vary significantly from one generation to the other or from one biological system to the other.

[0165] Nucleic acid-based modulators, including inhibitors, of Ras expression are useful for the prevention and/or treatment of cancer, including but not limited to breast cancer and ovarian cancer and any other disease or condition that respond to the modulation of Ras expression.

[0166] Nucleic acid-based inhibitors of HIV expression are useful for the prevention and/or treatment of acquired immunodeficiency disease (AIDS) and related diseases and conditions, including but not limited to Kaposi's sarcoma, lymphoma, cervical cancer, squamous cell carcinoma, cardiac myopathy, rheumatic diseases, and opportunistic infection, for example Pneumocystis carinii, Cytomegalovirus, Herpes simplex, Mycobacteria, Cryptococcus, Toxoplasma, Progressive multifocal leucoencepalopathy (Papovavirus), Mycobacteria, Aspergillus, Cryptococcus, Candida, Cryptosporidium, Isospora belli, Microsporidia and any other disease or condition which respond to the modulation of HIV expression.

[0167] Nucleic acid-based inhibitors of HER2 expression are useful for the prevention and/or treatment of cancer, including but not limited to breast cancer and ovarian cancer and any other disease or condition that respond to the modulation of HER2 expression.

[0168] By “related” is meant that the reduction of RAS, HIV, or HER2 expression (specifically RAS, HIV, or HER2 genes respectively) RNA levels and thus reduction in the level of the respective protein relieves, to some extent, the symptoms of the disease or condition.

[0169] The nucleic acid-based molecules of the invention can be added directly, or can be complexed with cationic lipids, packaged within liposomes, or otherwise delivered to target cells or tissues. The nucleic acid or nucleic acid complexes can be locally administered to relevant tissues ex vivo, or in vivo through injection or infusion pump, with or without their incorporation in biopolymers. In certain embodiments, the enzymatic nucleic acid molecules comprise sequences that are complementary to the substrate sequences in the Tables herein. Examples of such enzymatic nucleic acid molecules also are shown in the Tables herein. Examples of such enzymatic nucleic acid molecules consist essentially of sequences defined in these tables.

[0170] In another embodiment, the invention features siRNA, antisense nucleic acid molecules and 2-5A chimeras comprising sequences complementary to the substrate sequences shown in the Tables herein. Such nucleic acid molecules can comprise sequences as shown for the binding arms of the enzymatic nucleic acid molecules in the Tables. Similarly, triplex molecules can be targeted to corresponding DNA target regions; such molecules can comprise the DNA equivalent of a target sequence or a sequence complementary to the specified target (substrate) sequence. Typically, antisense molecules are complementary to a target sequence along a single contiguous sequence of the antisense molecule. However, in certain embodiments, an antisense molecule can bind to a substrate such that the substrate molecule forms a loop, and/or an antisense molecule can bind such that the antisense molecule forms a loop. Thus, the antisense molecule can be complementary to two or more non-contiguous substrate sequences. In addition, two or more non-contiguous sequence portions of an antisense molecule can be complementary to a target sequence.

[0171] By “consists essentially of” is meant that the active nucleic acid molecule of the invention, for example, an enzymatic nucleic acid molecule, contains an enzymatic center or core equivalent to those in the examples, and binding arms able to bind RNA such that cleavage at the target site occurs. Other sequences can be present that do not interfere with such cleavage. Thus, a core region of an enzymatic nucleic acid molecule can, for example, include one or more loop, stem-loop structure, or linker that does not prevent enzymatic activity. Thus, various regions in the sequences in the Tables can be such a loop, stem-loop, nucleotide linker, and/or non-nucleotide linker and can be represented generally as sequence “X”. The nucleic acid molecules of the instant invention, such as Hammerhead, Inozyme, G-cleaver, amberzyme, zinzyme, DNAzyme, antisense, 2-5A antisense, triplex forming nucleic acid, and decoy nucleic acids, can contain other sequences or non-nucleotide linkers that do not interfere with the function of the nucleic acid molecule.

[0172] Sequence X can be a linker of ≧2 nucleotides in length, preferably 3, 4, 5, 6, 7, 8, 9, 10, 15, 20, 26, 30, where the nucleotides can preferably be internally base-paired to form a stem of preferably ≧2 base pairs. Alternatively or in addition, sequence X can be a non-nucleotide linker. In yet another embodiment, the nucleotide linker X can be a nucleic acid aptamer, such as an ATP aptamer, Ras Rev aptamer (RRE), Ras Tat aptamer (TAR) and others (for a review see Gold et al., 1995, Annu. Rev. Biochem., 64, 763; and Szostak & Ellington, 1993, in The RNA World, ed. Gesteland and Atkins, pp. 511, CSH Laboratory Press). A “nucleic acid aptamer” as used herein is meant to indicate a nucleic acid sequence capable of interacting with a ligand. The ligand can be any natural or a synthetic molecule, including but not limited to a resin, metabolites, nucleosides, nucleotides, drugs, toxins, transition state analogs, peptides, lipids, proteins, amino acids, nucleic acid molecules, hormones, carbohydrates, receptors, cells, viruses, bacteria and others.

[0173] In yet another embodiment, a non-nucleotide linker X is as defined herein. Non-nucleotides as can include abasic nucleotide, polyether, polyamine, polyamide, peptide, carbohydrate, lipid, or polyhydrocarbon compounds. Specific examples include those described by Seela and Kaiser, Nucleic Acids Res. 1990, 18:6353 and Nucleic Acids Res. 1987, 15:3113; Cload and Schepartz, J. Am. Chem. Soc. 1991, 113:6324; Richardson and Schepartz, J. Am. Chem. Soc. 1991, 113:5109;

[0174] Ma et al, Nucleic Acids Res. 1993, 21:2585 and Biochemistry 1993, 32:1751; Durand et al., Nucleic Acids Res. 1990, 18:6353; McCurdy et al., Nucleosides & Nucleotides 1991, 10:287; Jschke et al., Tetrahedron Lett. 1993, 34:301; Ono et al., Biochemistry 1991, 30:9914; Arnold et al., International Publication No. WO 89/02439; Usman et al., International Publication No. WO 95/06731; Dudycz et al., International Publication No. WO 95/11910 and Ferentz and Verdine, J. Am. Chem. Soc. 1991, 113:4000, all hereby incorporated by reference herein. A “non-nucleotide” further means any group or compound that can be incorporated into a nucleic acid chain in the place of one or more nucleotide units, including either sugar and/or phosphate substitutions, and allows the remaining bases to exhibit their enzymatic activity. The group or compound can be abasic in that it does not contain a commonly recognized nucleotide base, such as adenosine, guanine, cytosine, uracil or thymine. Thus, in a preferred embodiment, the invention features an enzymatic nucleic acid molecule having one or more non-nucleotide moieties, and having enzymatic activity to cleave an RNA or DNA molecule.

[0175] In another aspect of the invention, enzymatic nucleic acid molecules, siRNA molecules or antisense molecules that interact with target RNA molecules and modulate gene expression activity are expressed from transcription units inserted into DNA or RNA vectors. The recombinant vectors are preferably DNA plasmids or viral vectors. Enzymatic nucleic acid molecule or antisense expressing viral vectors can be constructed based on, but not limited to, adeno-associated virus, retrovirus, adenovirus, or alphavirus as well as others known in the art. Preferably, recombinant vectors capable of expressing enzymatic nucleic acid molecules or antisense are delivered as described below, and persist in target cells. Alternatively, viral vectors can be used that provide for transient expression of enzymatic nucleic acid molecules or antisense. Such vectors can be repeatedly administered as necessary. Once expressed, the enzymatic nucleic acid molecules or antisense bind to target RNA and modulate its function or expression. Delivery of enzymatic nucleic acid molecule or antisense expressing vectors can be systemic, such as by intravenous or intramuscular administration, by administration to target cells ex-planted from the patient followed by reintroduction into the patient, or by any other means that allows for introduction into a desired target cell. Antisense DNA and DNAzymes can be expressed via the use of a single stranded DNA intracellular expression vector.

[0176] By “vectors” is meant any nucleic acid- and/or viral-based technique used to deliver a desired nucleic acid.

[0177] By “subject” or “patient” is meant an organism that is a donor or recipient of explanted cells or the cells of the organism. “Subject” or “patient” also refers to an organism to which the nucleic acid molecules of the invention can be administered. Preferably, a subject or patient is a mammal or mammalian cells. More preferably, a subject or patient is a human or human cells.

[0178] By “enhanced enzymatic activity” is meant to include activity measured in cells and/or in vivo where the activity is a reflection of both the catalytic activity and the stability of the nucleic acid molecules of the invention. In this invention, the product of these properties can be increased in vivo compared to an all RNA enzymatic nucleic acid or all DNA enzyme, for example, with a nucleic acid molecule comprising chemical modifications. In some cases, the activity or stability of the nucleic acid molecule can be decreased (i.e., less than ten-fold), but the overall activity of the nucleic acid molecule is enhanced, in vivo.

[0179] Nucleic acid molecules of the instant invention, individually, or in combination or in conjunction with other drugs, can be used to treat diseases or conditions discussed above. For example, to treat a disease or condition associated with the levels of Ras, HIV, or HER2, a subject can be treated, or other appropriate cells can be treated, as is evident to those skilled in the art, individually or in combination with one or more drugs under conditions suitable for the treatment.

[0180] In a further embodiment, the described molecules, such as antisense, siRNA, or enzymatic nucleic acid molecules, can be used in combination with other known treatments to treat conditions or diseases discussed above. For example, the described molecules can be used in combination with one or more known therapeutic agents to treat cancer, for example colorectal cancer, bladder cancer, lung cancer, pancreatic cancer, breast cancer, or prostate cancer, and any other disease or condition that respond to the modulation of Ras expression.

[0181] In another embodiment, the invention features nucleic acid-based inhibitors (e.g., enzymatic nucleic acid molecules, (including DNAzymes), siRNA and methods for their use to down regulate or inhibit the expression of genes (e.g., Ras genes) capable of progression and/or maintenance of cancer and/or other disease states that respond to the modulation of Ras expression.

[0182] In a further embodiment, the described molecules, such as antisense, siRNA, or enzymatic nucleic acids, can be used in combination with other known treatments to treat conditions or diseases discussed above. For example, the described molecules can be used in combination with one or more known therapeutic agents to treat acquired immunodeficiency disease (AIDS) and related diseases and conditions, including but not limited to Kaposi's sarcoma, lymphoma, cervical cancer, squamous cell carcinoma, cardiac myopathy, rheumatic diseases, and opportunistic infection, for example Pneumocystis carinii, Cytomegalovirus, Herpes simplex, Mycobacteria, Cryptococcus, Toxoplasma, Progressive multifocal leucoencepalopathy (Papovavirus), Mycobacteria, Aspergillus, Cryptococcus, Candida, Cryptosporidium, Isospora belli, Microsporidia and any other disease or condition which respond to the modulation of HIV expression.

[0183] Nucleic acid molecules of the instant invention, individually, or in combination or in conjunction with other drugs, can be used to treat diseases or conditions discussed above. For example, to treat a disease or condition associated with the levels of HER2, a patient can be treated, or other appropriate cells can be treated, as is evident to those skilled in the art, individually or in combination with one or more drugs under conditions suitable for the treatment.

[0184] In a further embodiment, the described molecules, such as antisense, siRNA or enzymatic nucleic acid molecules, can be used in combination with other known treatments to treat conditions or diseases discussed above. For example, the described molecules can be used in combination with one or more known therapeutic agents to treat cancer, for example ovarian cancer and/or breast cancer, and any other disease or condition that respond to the modulation of HER2 expression.

[0185] In another embodiment, the invention features nucleic acid-based inhibitors (e.g., enzymatic nucleic acid molecules, (including ribozymes, antisense nucleic acids, 2-5A antisense chimeras, triplex DNA, antisense nucleic acids containing RNA cleaving chemical groups), siRNA and methods for their use to down regulate or inhibit the expression of genes (e.g., HER2 genes) capable of progression and/or maintenance of cancer and/or other disease states that respond to the modulation of HER2 expression.

[0186] By “comprising” is meant including, but not limited to, whatever follows the word “comprising”. Thus, use of the term “comprising” indicates that the listed elements are required or mandatory, but that other elements are optional and may or may not be present. By “consisting of” is meant including, and limited to, whatever follows the phrase “consisting of”.

[0187] Other features and advantages of the invention will be apparent from the following description of the preferred embodiments thereof, and from the claims.

[0188] Mechanism of Action of Nucleic Acid Molecules of the Invention as is Know in the Art

[0189] Antisense: Antisense molecules can be modified or unmodified RNA, DNA, or mixed polymer oligonucleotides and primarily function by specifically binding to matching sequences resulting in inhibition of peptide synthesis (Wu-Pong, Nov 1994, BioPharm, 20-33). The antisense oligonucleotide binds to target RNA by Watson Crick base-pairing and blocks gene expression by preventing ribosomal translation of the bound sequences either by steric blocking or by activating RNase H enzyme. Antisense molecules can also alter protein synthesis by interfering with RNA processing or transport from the nucleus into the cytoplasm (Mukhopadhyay & Roth, 1996, Crit. Rev. in Oncogenesis 7, 151-190).

[0190] In addition, binding of single stranded DNA to RNA can result in nuclease degradation of the heteroduplex (Wu-Pong, supra; Crooke, supra). Backbone modified DNA chemistry which have been thus far been shown to act as substrates for RNase H are phosphorothioates, phosphorodithioates, and borontrifluoridates. In addition, 2′-arabino and 2′-fluoro arabino-containing oligos can also activate RNase H activity.

[0191] A number of antisense molecules have been described that utilize novel configurations of chemically modified nucleotides, secondary structure, and/or RNase H substrate domains (Woolf et al., International PCT Publication No. WO 98/13526; Thompson et al., International PCT Publication No. WO 99/54459; Hartmann et al., USSN 60/101,174, filed on Sep. 21, 1998). All of these references are incorporated by reference herein in their entirety.

[0192] In addition, antisense deoxyoligoribonucleotides can be used to target RNA by means of DNA-RNA interactions, thereby activating RNase H, which digests the target RNA in the duplex. Antisense DNA can be expressed via the use of a single stranded DNA intracellular expression vector or equivalents and variations thereof.

[0193] RNA interference: RNA interference refers to the process of sequence specific post transcriptional gene silencing in animals mediated by short interfering RNAs (siRNA) (Fire et al., 1998, Nature, 391, 806). The corresponding process in plants is commonly referred to as post transcriptional gene silencing or RNA silencing and is also referred to as quelling in fungi. The process of post transcriptional gene silencing is thought to be an evolutionarily conserved cellular defense mechanism used to prevent the expression of foreign genes which is commonly shared by diverse flora and phyla (Fire et al., 1999, Trends Genet., 15, 358). Such protection from foreign gene expression may have evolved in response to the production of double stranded RNAs (dsRNA) derived from viral infection or the random integration of transposon elements into a host genome via a cellular response that specifically destroys homologous single stranded RNA or viral genomic RNA. The presence of dsRNA in cells triggers the RNAi response though a mechanism that has yet to be fully characterized. This mechanism appears to be different from the interferon response that results from dsRNA mediated activation of protein kinase PKR and 2′,5′-oligoadenylate synthetase resulting in non-specific cleavage of mRNA by ribonuclease L.

[0194] The presence of long dsRNAs in cells stimulates the activity of a ribonuclease m enzyme referred to as dicer. Dicer is involved in the processing of the dsRNA into short pieces of dsRNA known as short interfering RNAs (siRNA) (Berstein et al., 2001, Nature, 409, 363). Short interfering RNAs derived from dicer activity are typically about 21-23 nucleotides in length and comprise about 19 base pair duplexes. Dicer has also been implicated in the excision of 21 and 22 nucleotide small temporal RNAs (stRNA) from precursor RNA of conserved structure that are implicated in translational control (Hutvagner et al., 2001, Science, 293, 834). The RNAi response also features an endonuclease complex containing a siRNA, commonly referred to as an RNA-induced silencing complex (RISC), which mediates cleavage of single stranded RNA having sequence homologous to the siRNA. Cleavage of the target RNA takes place in the middle of the region complementary to the guide sequence of the siRNA duplex (Elbashir et al., 2001, Genes Dev., 15, 188).

[0195] Short interfering RNA mediated RNAi has been studied in a variety of systems. Fire et al., 1998, Nature, 391, 806, were the first to observe RNAi in C. Elegans. Wianny and Goetz, 1999, Nature Cell Biol., 2, 70, describes RNAi mediated by dsRNA in mouse embryos. Hammond et al., 2000, Nature, 404, 293, describe RNAi in Drosophila cells transfected with dsRNA. Elbashir et al., 2001, Nature, 411, 494, describe RNAi induced by introduction of duplexes of synthetic 21-nucleotide RNAs in cultured mammalian cells including human embryonic kidney and HeLa cells. Recent work in Drosophila embryonic lysates has revealed certain requirements for siRNA length, structure, chemical composition, and sequence that are essential to mediate efficient RNAi activity. These studies have shown that 21 nucleotide siRNA duplexes are most active when containing two nucleotide 3′-overhangs. Furthermore, substitution of one or both siRNA strands with 2′-deoxy or 2′-O-methyl nucleotides abolishes RNAi activity, whereas substitution of 3′-terminal siRNA nucleotides with deoxy nucleotides was shown to be tolerated. Mismatch sequences in the center of the siRNA duplex were also shown to abolish RNAi activity. In addition, these studies also indicate that the position of the cleavage site in the target RNA is defined by the 5′-end of the siRNA guide sequence rather than the 3′-end (Elbashir et al., 2001, EMBO J, 20, 6877). Other studies have indicated that a 5′-phosphate on the target-complementary strand of a siRNA duplex is required for siRNA activity and that ATP is utilized to maintain the 5′-phosphate moiety on the siRNA (Nykanen et al., 2001, Cell, 107, 309), however siRNA molecules lacking a 5′-phosphate are active when introduced exogenously, suggesting that 5′-phosphorylation of siRNA constructs may occur in vivo.

[0196] Enzvmatic Nucleic Acid: Several varieties of naturally-occurring enzymatic RNAs are presently known. In addition, several in vitro selection (evolution) strategies (Orgel, 1979, Proc. R. Soc. London, B 205, 435) have been used to evolve new nucleic acid catalysts capable of catalyzing cleavage and ligation of phosphodiester linkages (Joyce, 1989, Gene, 82, 83-87; Beaudry et al., 1992, Science 257, 635-641; Joyce, 1992, Scientific American 267, 90-97; Breaker et al., 1994, TIBTECH 12, 268; Bartel et al.,1993, Science 261:1411-1418; Szostak, 1993, TIBS 17, 89-93; Kumar et al., 1995, FASEB J., 9, 1183; Breaker, 1996, Curr. Op. Biotech., 7, 442; Santoro et al., 1997, Proc. Natl. Acad. Sci., 94, 4262; Tang et al., 1997, RNA 3, 914; Nakamaye & Eckstein, 1994, supra; Long & Uhlenbeck, 1994, supra; Ishizaka et al., 1995, supra; Vaish et al., 1997, Biochemistry 36, 6495; all of these are incorporated by reference herein). Each can catalyze a series of reactions including the hydrolysis of phosphodiester bonds in trans (and thus can cleave other RNA molecules) under physiological conditions.

[0197] Nucleic acid molecules of this invention can modulate, e.g., down-regulate, Ras protein expression and can be used to treat disease or diagnose disease associated with the levels of Ras, HIV and/or HER2. Enzymatic nucleic acid sequences targeting Ras, HIV and/or HER2 RNA and sequences that can be targeted with nucleic acid molecules of the invention to down-regulate Ras expression are shown in the Tables herein.

[0198] The enzymatic nature of an enzymatic nucleic acid molecule allows the concentration of enzymatic nucleic acid molecule necessary to affect a therapeutic treatment to be lower than a nucleic acid molecule lacking enzymatic activity. This reflects the ability of the enzymatic nucleic acid molecule to act enzymatically. Thus, a single enzymatic nucleic acid molecule is able to cleave many molecules of target RNA. In addition, the enzymatic nucleic acid molecule is a highly specific inhibitor, with the specificity of inhibition depending not only on the base-pairing mechanism of binding to the target RNA, but also on the mechanism of target RNA cleavage. Single mismatches, or base-substitutions, near the site of cleavage can be chosen to completely eliminate catalytic activity of a enzymatic nucleic acid molecule.

[0199] Nucleic acid molecules having an endonuclease enzymatic activity are able to repeatedly cleave other separate RNA molecules in a nucleotide base sequence-specific manner. With proper design and construction, such enzymatic nucleic acid molecules can be targeted to virtually any RNA transcript, and achieve efficient cleavage in vitro (Zaug et al., 324, Nature 429 1986; Uhlenbeck, 1987 Nature 328, 596; Kim et al., 84 Proc. Natl. Acad. Sci. USA 8788, 1987; Dreyfus, 1988, Einstein Quart. J. Bio. Med., 6, 92; Haseloff and Gerlach, 334 Nature 585, 1988; Cech, 260 JAMA 3030, 1988; and Jefferies et al., 17 Nucleic Acids Research 1371, 1989; Santoro et al., 1997 supra).

[0200] Because of their sequence specificity, trans-cleaving enzymatic nucleic acid molecules can be used as therapeutic agents for human disease (Usman & McSwiggen, 1995 Ann. Rep. Med. Chem. 30, 285-294; Christoffersen and Marr, 1995 J. Med. Chem. 38, 2023-2037). Enzymatic nucleic acid molecules can be designed to cleave specific RNA targets within the background of cellular RNA. Such a cleavage event renders the RNA non-functional and abrogates protein expression from that RNA. In this manner, synthesis of a protein associated with a disease state can be selectively inhibited (Warashina et al., 1999, Chemistry and Biology, 6, 237-250).

[0201] Enzymatic nucleic acid molecules of the invention that are allosterically regulated (“allozymes”) can be used to modulate, including down-regulate, Ras, HIV and/or HER2 expression. These allosteric enzymatic nucleic acids or allozymes (see for example George et al., U.S. Pat. Nos. 5,834,186 and 5,741,679, Shih et al., U.S. Pat. No. 5,589,332, Nathan et al., US Patent No 5,871,914, Nathan and Ellington, International PCT publication No. WO 00/24931, Breaker et al., International PCT Publication Nos. WO 00/26226 and 98/27104, and Sullenger et al, International PCT publication No. WO 99/29842) are designed to respond to a signaling agent, for example, mutant Ras, HIV and/or HER2 protein, wild-type Ras, HIV and/or HER2 protein, mutant Ras, HIV and/or HER2 RNA, wild-type Ras, HIV and/or HER2 RNA, other proteins and/or RNAs involved in Ras, HIV and/or HER2 activity, compounds, metals, polymers, molecules and/or drugs that are targeted to Ras, HIV and/or HER2 expressing cells etc., which, in turn, modulate the activity of the enzymatic nucleic acid molecule. In response to interaction with a predetermined signaling agent, the activity of the allosteric enzymatic nucleic acid molecule is activated or inhibited such that the expression of a particular target is selectively regulated, including down-regulated. The target can comprise wild-type Ras, HIV and/or HER2, mutant Ras, HIV and/or HER2, a component of Ras, HIV and/or HER2, and/or a predetermined cellular component that modulates Ras, HIV and/or HER2 activity. For example, allosteric enzymatic nucleic acid molecules that are activated by interaction with a RNA encoding Ras, HIV and/or HER2 protein can be used as therapeutic agents in vivo. The presence of RNA encoding the Ras, HIV and/or HER2 protein activates the allosteric enzymatic nucleic acid molecule that subsequently cleaves the RNA encoding Ras, HIV and/or HER2 protein, resulting in the inhibition of Ras, HIV and/or HER2 protein expression. In this manner, cells that express the Ras, HIV and/or HER2 protein are selectively targeted.

[0202] In another non-limiting example, an allozyme can be activated by a Ras, HIV and/or HER2 protein, peptide, or mutant polypeptide that causes the allozyme to inhibit the expression of Ras, HIV and/or HER2 gene, by, for example, cleaving RNA encoded by Ras, HIV and/or HER2 gene. In this non-limiting example, the allozyme acts as a decoy to inhibit the function of Ras, HIV and/or HER2 and also inhibit the expression of Ras, HIV and/or HER2 once activated by the Ras, HIV and/or HER2 protein.

[0203] Target sites

[0204] Targets for useful enzymatic nucleic acid molecules and antisense nucleic acids can be determined as disclosed in Draper et al., WO 93/23569; Sullivan et al., WO 93/23057; Thompson et al., WO 94/02595; Draper et al., WO 95/04818; McSwiggen et al., U.S. Pat. No. 5,525,468, and hereby incorporated by reference herein in totality. Other examples include the following PCT applications, which concern inactivation of expression of disease-related genes: WO 95/23225, WO 95/13380, WO 94/02595, incorporated by reference herein. Rather than repeat the guidance provided in those documents here, below are provided specific non-limiting examples of such methods. Enzymatic nucleic acid molecules to such targets are designed as described in the above applications and synthesized to be tested in vitro and in vivo, as also described. The sequences of human K-Ras, H-Ras, HIV-1 and HER2 RNAs were screened for optimal enzymatic nucleic acid target sites using a computer-folding algorithm. Nucleic acid molecule binding/cleavage sites were identified. These sites are shown in the Tables (all sequences are 5′ to 3′ in the tables). The nucleotide base position is noted in the Tables as that site to be cleaved by the designated type of enzymatic nucleic acid molecule. Human sequences can be screened and enzymatic nucleic acid molecule and/or antisense thereafter designed, as discussed in Stinchcomb et al., WO 95/23225. In addition, mouse targeted nucleic acid molecules can be used to test efficacy of action of the enzymatic nucleic acid molecule, siRNA and/or antisense prior to testing in humans.

[0205] In addition, enzymatic nucleic acid, siRNA, and antisense nucleic acid molecule binding/cleavage sites were identified. The nucleic acid molecules are individually analyzed by computer folding (Jaeger et al., 1989 Proc. Natl. Acad. Sci. USA, 86, 7706) to assess whether the sequences fold into the appropriate secondary structure. Those nucleic acid molecules with unfavorable intramolecular interactions, such as between, for example the binding arms and the catalytic core of an enzymatic nucleic acid, are eliminated from consideration. Varying binding arm lengths can be chosen to optimize activity.

[0206] Antisense, hammerhead, DNAzyme, NCH, amberzyme, zinzyme or G-Cleaver enzymatic nucleic acid molecule, siRNA, and antisense nucleic acid binding/cleavage sites were identified and were designed to anneal to various sites in the RNA target. The enzymatic nucleic acid binding arms or siRNA and antisense nucleic acid sequences are complementary to the target site sequences described above. The nucleic acid molecules are chemically synthesized. The method of synthesis used follows the procedure for normal DNA/RNA synthesis as described below and in Usman et al., 1987 J. Am. Chem. Soc., 109, 7845; Scaringe et al., 1990 Nucleic Acids Res., 18, 5433; and Wincott et al., 1995 Nucleic Acids Res. 23, 2677-2684; Caruthers et al., 1992, Methods in Enzymology 211,3-19.

[0207] Synthesis of Nucleic acid Molecules

[0208] Synthesis of nucleic acids greater than 100 nucleotides in length can be difficult using automated methods, and the therapeutic cost of such molecules can be prohibitive. In this invention, small nucleic acid motifs (“small” refers to nucleic acid motifs less than about 100 nucleotides in length, preferably less than about 80 nucleotides in length, and more preferably less than about 50 nucleotides in length; e.g., DNAzymes) are preferably used for exogenous delivery. The simple structure of these molecules increases the ability of the nucleic acid to invade targeted regions of RNA structure. Exemplary molecules of the instant invention are chemically synthesized as described herein, and others can similarly be synthesized.

[0209] Oligonucleotides (e.g., DNAzymes, antisense) are synthesized using protocols known in the art as described in Caruthers et al., 1992, Methods in Enzymology 211, 3-19, Thompson et al., International PCT Publication No. WO 99/54459, Wincott et al., 1995, Nucleic Acids Res. 23, 2677-2684, Wincott et al., 1997, Methods Mol. Bio., 74, 59, Brennan et al., 1998, Biotechnol Bioeng., 61, 33-45, and Brennan, U.S. Pat. No. 6,001,311. All of these references are incorporated herein by reference. The synthesis of oligonucleotides makes use of common nucleic acid protecting and coupling groups, such as dimethoxytrityl at the 5′-end, and phosphoramidites at the 3′-end. In a non-limiting example, small scale syntheses are conducted on a 394 Applied Biosystems, Inc. synthesizer using a 0.2 μmol scale protocol with a 2.5 min coupling step for 2′-O-methylated nucleotides and a 45 sec coupling step for 2′-deoxy nucleotides. Table I outlines the amounts and the contact times of the reagents used in the synthesis cycle. Alternatively, syntheses at the 0.2 μmol scale can be performed on a 96-well plate synthesizer, such as the instrument produced by Protogene (Palo Alto, Calif.) with minimal modification to the cycle. A 33-fold excess (60 μL of 0.11 M=6.6 μmol) of 2′-O-methyl phosphoramidite and a 105-fold excess of S-ethyl tetrazole (60 μL of 0.25 M=15 μmol) can be used in each coupling cycle of 2′-O-methyl residues relative to polymer-bound 5′-hydroxyl. A 22-fold excess (40 μL of 0.11 M=4.4 μmol) of deoxy phosphoramidite and a 70-fold excess of S-ethyl tetrazole (40 μL of 0.25 M=10 μmol) can be used in each coupling cycle of deoxy residues relative to polymer-bound 5′-hydroxyl. Average coupling yields on the 394 Applied Biosystems, Inc. synthesizer, determined by colorimetric quantitation of the trityl fractions, are typically 97.5-99%. Other oligonucleotide synthesis reagents for the 394 Applied Biosystems, Inc. synthesizer include; detritylation solution is 3% TCA in methylene chloride (ABI); capping is performed with 16% N-methyl imidazole in THF (ABI) and 10% acetic anhydride/10% 2,6-lutidine in THF (ABI); and oxidation solution is 16.9 mM I₂, 49 mM pyridine, 9% water in THF (PERSEPTIVE™). Burdick & Jackson Synthesis Grade acetonitrile is used directly from the reagent bottle. S-Ethyltetrazole solution (0.25 M in acetonitrile) is made up from the solid obtained from American International Chemical, Inc. Alternately, for the introduction of phosphorothioate linkages, Beaucage reagent (3H-1,2-Benzodithiol-3-one 1,1-dioxide, 0.05 M in acetonitrile) is used.

[0210] Deprotection of the DNAzymes is performed as follows: the polymer-bound trityl-on oligoribonucleotide is transferred to a 4 mL glass screw top vial and suspended in a solution of 40% aq. methylamine (1 mL) at 65° C. for 10 min. After cooling to −20° C., the supernatant is removed from the polymer support. The support is washed three times with 1.0 mL of EtOH:MeCN:H2O/3:1:1, vortexed and the supernatant is then added to the first supernatant. The combined supernatants, containing the oligoribonucleotide, are dried to a white powder.

[0211] The method of synthesis used for RNA and chemically modified RNA or DNA, including certain enzymatic nucleic acid molecules and siRNA molecules, follows the procedure as described in Usman et al., 1987, J. Am. Chem. Soc., 109, 7845; Scaringe et al., 1990, Nucleic Acids Res., 18, 5433; and Wincott et al., 1995, Nucleic Acids Res. 23, 2677-2684 Wincott et al., 1997, Methods Mol. Bio., 74, 59, and makes use of common nucleic acid protecting and coupling groups, such as dimethoxytrityl at the 5′-end, and phosphoramidites at the 3′-end. In a non-limiting example, small scale syntheses are conducted on a 394 Applied Biosystems, Inc. synthesizer using a 0.2 μmol scale protocol with a 7.5 min coupling step for alkylsilyl protected nucleotides and a 2.5 min coupling step for 2′-O-methylated nucleotides. Table I outlines the amounts and the contact times of the reagents used in the synthesis cycle. Alternatively, syntheses at the 0.2 μmol scale can be done on a 96-well plate synthesizer, such as the instrument produced by Protogene (Palo Alto, Calif.) with minimal modification to the cycle. A 33-fold excess (60 μL of 0.11 M=6.6 μmol) of 2′-O-methyl phosphoramidite and a 75-fold excess of S-ethyl tetrazole (60 μL of 0.25 M=15 μmol) can be used in each coupling cycle of 2′-O-methyl residues relative to polymer-bound 5′-hydroxyl. A 66-fold excess (120 μL of 0.11 M=13.2 μmol) of alkylsilyl (ribo) protected phosphoramidite and a 150-fold excess of S-ethyl tetrazole (120 μL of 0.25 M=30 μmol) can be used in each coupling cycle of ribo residues relative to polymer-bound 5′-hydroxyl. Average coupling yields on the 394 Applied Biosystems, Inc. synthesizer, determined by colorimetric quantitation of the trityl fractions, are typically 97.5-99%. Other oligonucleotide synthesis reagents for the 394 Applied Biosystems, Inc. synthesizer include; detritylation solution is 3% TCA in methylene chloride (ABI); capping is performed with 16% N-methyl imidazole in THF (ABI) and 10% acetic anhydride/10% 2,6-lutidine in THF (ABI); oxidation solution is 16.9 mM I₂, 49 mM pyridine, 9% water in THF (PERSEPTIVE™). Burdick & Jackson Synthesis Grade acetonitrile is used directly from the reagent bottle. S-Ethyltetrazole solution (0.25 M in acetonitrile) is made up from the solid obtained from American International Chemical, Inc. Alternately, for the introduction of phosphorothioate linkages, Beaucage reagent (3H-1,2-Benzodithiol-3-one 1,1-dioxide 0.05 M in acetonitrile) is used.

[0212] Deprotection of the RNA is performed using either a two-pot or one-pot protocol. For the two-pot protocol, the polymer-bound trityl-on oligoribonucleotide is transferred to a 4 mL glass screw top vial and suspended in a solution of 40% aq. methylamine (1 mL) at 65° C. for 10 min. After cooling to −20° C., the supernatant is removed from the polymer support. The support is washed three times with 1.0 mL of EtOH:MeCN:H2O/3:1:1, vortexed and the supernatant is then added to the first supernatant. The combined supernatants, containing the oligoribonucleotide, are dried to a white powder. The base deprotected oligoribonucleotide is resuspended in anhydrous TEA/HF/NMP solution (300 μL of a solution of 1.5 mL N-methylpyrrolidinone, 750 μL TEA and 1 mL TEA·3HF to provide a 1.4 M HF concentration) and heated to 65° C. After 1.5 h, the oligomer is quenched with 1.5 M NH₄HCO₃.

[0213] Alternatively, for the one-pot protocol, the polymer-bound trityl-on oligoribonucleotide is transferred to a 4 mL glass screw top vial and suspended in a solution of 33% ethanolic methylamine/DMSO: 1/1 (0.8 mL) at 65° C. for 15 min. The vial is brought to r.t. TEA·3HF (0.1 mL) is added and the vial is heated at 65° C. for 15 min. The sample is cooled at −20° C. and then quenched with 1.5 M NH₄HCO₃.

[0214] For purification of the trityl-on oligomers, the quenched NH₄HCO₃ solution is loaded onto a C-18 containing cartridge that had been prewashed with acetonitrile followed by 50 mM TEAA. After washing the loaded cartridge with water, the RNA is detritylated with 0.5% TFA for 13 min. The cartridge is then washed again with water, salt exchanged with 1 M NaCl and washed with water again. The oligonucleotide is then eluted with 30% acetonitrile.

[0215] Inactive nucleic acid molecules or binding attenuated control (BAC) oligonucleotides can be synthesized by substituting one or more nucleotides in the nucleic acid molecule to inactivate the molecule and such molecules can serve as a negative control.

[0216] The average stepwise coupling yields are typically >98% (Wincott et al., 1995 Nucleic Acids Res. 23, 2677-2684). Those of ordinary skill in the art will recognize that the scale of synthesis can be adapted to be larger or smaller than the example described above including but not limited to 96 well format, all that is important is the ratio of chemicals used in the reaction.

[0217] Alternatively, the nucleic acid molecules of the present invention can be synthesized separately and joined together post-synthetically, for example by ligation (Moore et al., 1992, Science 256, 9923; Draper et al., International PCT publication No. WO 93/23569; Shabarova et al., 1991, Nucleic Acids Research 19, 4247; Bellon et al., 1997, Nucleosides & Nucleotides, 16, 951; Bellon et al., 1997, Bioconjugate Chem. 8, 204).

[0218] The nucleic acid molecules of the present invention can be modified extensively to enhance stability by modification with nuclease resistant groups, for example, 2′-amino, 2′-C-allyl, 2′-flouro, 2′-O-methyl, 2′-H (for a review see Usman and Cedergren, 1992, TIBS 17, 34; Usman et al., 1994, Nucleic Acids Symp. Ser. 31, 163). Enzymatic nucleic acid molecules are purified by gel electrophoresis using known methods or are purified by high pressure liquid chromatography (HPLC; See Wincott et al., Supra, the totality of which is hereby incorporated herein by reference) and are re-suspended in water.

[0219] The sequences of the nucleic acid molecules, including enzymatic nucleic acid molecules and antisense, that are chemically synthesized, are shown in the Tables herein. These sequences are representative only of many more such sequences where the enzymatic portion of the enzymatic nucleic acid molecule (all but the binding arms) is modified to affect activity. For example, the enzymatic nucleic acid sequences listed in the Tables can be formed of deoxyribonucleotides or other nucleotides or non-nucleotides. Such enzymatic nucleic acid molecules with enzymatic activity are equivalent to the enzymatic nucleic acid molecules described specifically in the Tables.

[0220] Optimizing Activity of the Nucleic Acid Molecule of the Invention.

[0221] Chemically synthesizing nucleic acid molecules with modifications (base, sugar and/or phosphate) that prevent their degradation by serum ribonucleases can increase their potency (see e.g., Eckstein et al., International Publication No. WO 92/07065; Perrault et al., 1990 Nature 344, 565; Pieken et al., 1991, Science 253, 314; Usman and Cedergren, 1992, Trends in Biochem. Sci. 17, 334; Usman et al., International Publication No. WO 93/15187; and Rossi et al., International Publication No. WO 91/03162; Sproat, U.S. Pat. No. 5,334,711; and Burgin et al., supra, all of which are hereby incorporated by reference in their entirety). All of the above references describe various chemical modifications that can be made to the base, phosphate and/or sugar moieties of the nucleic acid molecules described herein. Modifications which enhance their efficacy in cells, and removal of bases from nucleic acid molecules to shorten oligonucleotide synthesis times and reduce chemical requirements are desired.

[0222] There are several examples of sugar, base and phosphate modifications that can be introduced into nucleic acid molecules with significant enhancement in their nuclease stability and efficacy. For example, oligonucleotides can be modified to enhance stability and/or enhance biological activity by modification with nuclease resistant groups, for example, 2′-amino, 2′-C-allyl, 2′-flouro, 2′-O-methyl, 2′-H, nucleotide base modifications (for a review see Usman and Cedergren, 1992, TIBS. 17, 34; Usman et al., 1994, Nucleic Acids Symp. Ser. 31, 163; Burgin et al., 1996, Biochemistry , 35, 14090). Sugar modification of nucleic acid molecules are also known to increase efficacy (see Eckstein et al., International Publication PCT No. WO 92/07065; Perrault et al. Nature, 1990, 344, 565-568; Pieken et al. Science, 1991, 253, 314-317; Usman and Cedergren, Trends in Biochem. Sci., 1992, 17, 334-339; Usman et al. International Publication PCT No. WO 93/15187; Sproat, U.S. Pat. No.5,334,711 and Beigelman et al., 1995, J. Biol. Chem., 270, 25702; Beigelman et al., International PCT publication No. WO 97/26270; Beigelman et al., U.S. Pat. No. 5,716,824; Usman et al., U.S. Pat. No. 5,627,053; Woolf et al., International PCT Publication No. WO 98/13526; Thompson et al., USSN 60/082,404 which was filed on Apr. 20, 1998; Karpeisky et al., 1998, Tetrahedron Lett., 39, 1131; Earnshaw and Gait, 1998, Biopolymers (Nucleic acid Sciences), 48, 39-55; Verma and Eckstein, 1998, Annu. Rev. Biochem., 67, 99-134; and Burlina et al., 1997, Bioorg. Med. Chem., 5, 1999-2010; all of the references are hereby incorporated in their totality by reference herein). The publications describe general methods and strategies to determine the location of incorporation of sugar, base and/or phosphate modifications and the like into enzymatic nucleic acid molecules without inhibiting catalysis. Similar modifications can be used as described herein to modify the nucleic acid molecules of the instant invention.

[0223] While chemical modification of oligonucleotide internucleotide linkages with phosphorothioate, phosphorothioate, and/or 5′-methylphosphonate linkages improves stability, excessive modifications can cause some toxicity. Therefore, when designing nucleic acid molecules, the amount of these internucleotide linkages should be minimized. The reduction in the concentration of these linkages can lower toxicity, resulting in increased efficacy and higher specificity of the therapeutic nucleic acid molecules.

[0224] Nucleic acid molecules having chemical modifications that maintain or enhance activity are provided. Such nucleic acid molecules are also generally more resistant to nucleases than unmodified nucleic acid molecules. Thus, the in vitro and/or in vivo activity should not be significantly lowered. Therapeutic nucleic acid molecules delivered exogenously are optimally stable within cells until translation of the target RNA has been inhibited long enough to reduce the levels of the undesirable protein. This period of time varies between hours to days, depending upon the disease state. Nucleic acid molecules are preferably resistant to nucleases in order to function as effective intracellular therapeutic agents. Improvements in the chemical synthesis of RNA and DNA (Wincott et al., 1995 Nucleic Acids Res. 23, 2677; Caruthers et al., 1992, Methods in Enzymology 211,3-19 (incorporated by reference herein)) have expanded the ability to modify nucleic acid molecules by introducing nucleotide modifications to enhance their nuclease stability as described above.

[0225] In one embodiment, nucleic acid molecules of the invention include one or more G-clamp nucleotides. A G-clamp nucleotide is a modified cytosine analog wherein modifications result in the ability to hydrogen bond both Watson-Crick and Hoogsteen faces of a complementary guanine within a duplex, see for example Lin and Matteucci, 1998, J. Am. Chem. Soc., 120, 8531-8532. A single G-clamp analog substation within an oligonucleotide can result in substantially enhanced helical thermal stability and mismatch discrimination when hybridized to complementary oligonucleotides. The inclusion of such nucleotides in nucleic acid molecules of the invention can enable both enhanced affinity and specificity to nucleic acid targets.

[0226] In another embodiment, the invention features conjugates and/or complexes of nucleic acid molecules targeting Ras genes such as K-Ras, H-Ras, and/or N-Ras. Compositions and conjugates are used to facilitate delivery of molecules into a biological system, such as cells. The conjugates provided by the instant invention can impart therapeutic activity by transferring therapeutic compounds across cellular membranes, altering the pharmacokinetics, and/or modulating the localization of nucleic acid molecules of the invention. The present invention encompasses the design and synthesis of novel agents for the delivery of molecules, including but not limited to, small molecules, lipids, phospholipids, nucleosides, nucleotides, nucleic acids, antibodies, toxins, negatively charged polymers and other polymers, for example proteins, peptides, hormones, carbohydrates, polyethylene glycols, or polyamines, across cellular membranes. In general, the transporters described are designed to be used either individually or as part of a multi-component system, with or without degradable linkers. These compounds are expected to improve delivery and/or localization of nucleic acid molecules of the invention into a number of cell types originating from different tissues, in the presence or absence of serum (see Sullenger and Cech, U.S. Pat. No. 5,854,038). Conjugates of the molecules described herein can be attached to biologically active molecules via linkers that are biodegradable, such as biodegradable nucleic acid linker molecules.

[0227] The term “biodegradable nucleic acid linker molecule” as used herein, refers to a nucleic acid molecule that is designed as a biodegradable linker to connect one molecule to another molecule, for example, a biologically active molecule. The stability of the biodegradable nucleic acid linker molecule can be modulated by using various combinations of ribonucleotides, deoxyribonucleotides, and chemically modified nucleotides, for example 2′-O-methyl, 2′-fluoro, 2′-amino, 2′-O-amino, 2′-C-allyl, 2′-O-allyl, and other 2′-modified or base modified nucleotides. The biodegradable nucleic acid linker molecule can be a dimer, trimer, tetramer or longer nucleic acid molecule, for example, an oligonucleotide of about 2, 3, 4, 5, 6, 7, 8, 9, 10, 11, 12, 13, 14, 15, 16, 17, 18, 19, or 20 nucleotides in length, or can comprise a single nucleotide with a phosphorus based linkage, for example, a phosphoramidate or phosphodiester linkage. The biodegradable nucleic acid linker molecule can also comprise nucleic acid backbone, nucleic acid sugar, or nucleic acid base modifications.

[0228] The term “biodegradable” as used herein, refers to degradation in a biological system, for example, enzymatic degradation or chemical degradation.

[0229] The term “biologically active molecule” as used herein, refers to compounds or molecules that are capable of eliciting or modifying a biological response in a system. Non-limiting examples of biologically active molecules contemplated by the instant invention include therapeutically active molecules such as antibodies, hormones, antivirals, peptides, proteins, chemotherapeutics, small molecules, vitamins, co-factors, nucleosides, nucleotides, oligonucleotides, enzymatic nucleic acids, antisense nucleic acids, triplex forming oligonucleotides, 2,5-A chimeras, siRNA, dsRNA, allozymes, aptamers, decoys and analogs thereof. Biologically active molecules of the invention also include molecules capable of modulating the pharmacokinetics and/or pharmacodynamics of other biologically active molecules, for example lipids and polymers such as polyamines, polyamides, polyethylene glycol and other polyethers.

[0230] The term “phospholipid” as used herein, refers to a hydrophobic molecule comprising at least one phosphorus group. For example, a phospholipid can comprise a phosphorus containing group and saturated or unsaturated alkyl group, optionally substituted with OH, COOH, oxo, amine, or substituted or unsubstituted aryl groups.

[0231] Use of the nucleic acid-based molecules of the invention can lead to better treatment of the disease progression by affording the possibility of combination therapies (e.g., multiple antisense or enzymatic nucleic acid molecules targeted to different genes, nucleic acid molecules coupled with known small molecule inhibitors, or intermittent treatment with combinations of molecules (including different motifs) and/or other chemical or biological molecules). The treatment of subjects with nucleic acid molecules can also include combinations of different types of nucleic acid molecules.

[0232] In the case that down-regulation of the target is desired, therapeutic nucleic acid molecules (e.g., DNAzymes) delivered exogenously are optimally stable within cells until translation of the target RNA has been inhibited long enough to reduce the levels of the targeted protein. This period of time varies between hours to days depending upon the disease state. These nucleic acid molecules should be resistant to nucleases in order to function as effective intracellular therapeutic agents. Improvements in the chemical synthesis of nucleic acid molecules described in the instant invention and others known in the art have expanded the ability to modify nucleic acid molecules by introducing nucleotide modifications to enhance their nuclease stability as described above.

[0233] In another embodiment, nucleic acid catalysts having chemical modifications that maintain or enhance enzymatic activity are provided. Such nucleic acids are also generally more resistant to nucleases than unmodified nucleic acid. Thus, the in vitro and/or in vivo the activity of the nucleic acid should not be significantly lowered. As exemplified herein, such enzymatic nucleic acids are useful for in vitro and/or in vivo techniques even if activity over all is reduced 10 fold (Burgin et al., 1996, Biochemistry, 35, 14090). Such enzymatic nucleic acids herein are said to “maintain” the enzymatic activity of an all RNA ribozyme or all DNA DNAzyme.

[0234] In another aspect the nucleic acid molecules comprise a 5′ and/or a 3′-cap structure.

[0235] By “cap structure” is meant chemical modifications, which have been incorporated at either terminus of the oligonucleotide (see, for example, Wincott et al., WO 97/26270, incorporated by reference herein). These terminal modifications protect the nucleic acid molecule from exonuclease degradation, and can help in delivery and/or localization within a cell. The cap can be present at the 5′-terminus (5′-cap) or at the 3′-terminus (3′-cap) or can be present on both termini. In non-limiting examples, the 5′-cap includes inverted abasic residue (moiety), 4′,5′-methylene nucleotide; 1-(beta-D-erythrofuranosyl) nucleotide, 4′-thio nucleotide, carbocyclic nucleotide; 1,5-anhydrohexitol nucleotide; L-nucleotides; alpha-nucleotides; modified base nucleotide; phosphorodithioate linkage; threo-pentofuranosyl nucleotide; acyclic 3′,4′-seco nucleotide; acyclic 3,4-dihydroxybutyl nucleotide; acyclic 3,5-dihydroxypentyl nucleotide, 3′-3′-inverted nucleotide moiety; 3′-3′-inverted abasic moiety; 3′-2′-inverted nucleotide moiety; 3′-2′-inverted abasic moiety; 1,4-butanediol phosphate; 3′-phosphoramidate; hexylphosphate; aminohexyl phosphate; 3′-phosphate; 3′-phosphorothioate; phosphorodithioate; or bridging or non-bridging methylphosphonate moiety (for more details see Wincott et al., International PCT publication No. WO 97/26270, incorporated by reference herein).

[0236] In another embodiment, the 3′-cap includes, for example 4′,5′-methylene nucleotide; 1-(beta-D-erythrofuranosyl) nucleotide; 4′-thio nucleotide, carbocyclic nucleotide; 5′-amino-alkyl phosphate; 1,3-diamino-2-propyl phosphate, 3-aminopropyl phosphate; 6-aminohexyl phosphate; 1,2-aminododecyl phosphate; hydroxypropyl phosphate; 1,5-anhydrohexitol nucleotide; L-nucleotide; alpha-nucleotide; modified base nucleotide; phosphorodithioate; threo-pentofuranosyl nucleotide; acyclic 3′,4′-seco nucleotide; 3,4-dihydroxybutyl nucleotide; 3,5-dihydroxypentyl nucleotide, 5′-5′-inverted nucleotide moiety; 5′-5′-inverted abasic moiety; 5′-phosphoramidate; 5′-phosphorothioate; 1,4-butanediol phosphate; 5′-amino; bridging and/or non-bridging 5′-phosphoramidate, phosphorothioate and/or phosphorodithioate, bridging or non bridging methylphosphonate and 5′-mercapto moieties (for more details see Beaucage and Iyer, 1993, Tetrahedron 49, 1925; incorporated by reference herein).

[0237] By the term “non-nucleotide” is meant any group or compound which can be incorporated into a nucleic acid chain in the place of one or more nucleotide units, including either sugar and/or phosphate substitutions, and allows the remaining bases to exhibit their enzymatic activity. The group or compound is abasic in that it does not contain a commonly recognized nucleotide base, such as adenosine, guanine, cytosine, uracil or thymine.

[0238] The term “alkyl” as used herein refers to a saturated aliphatic hydrocarbon, including straight-chain, branched-chain “isoalkyl”, and cyclic alkyl groups. The term “alkyl” also comprises alkoxy, alkyl-thio, alkyl-thio-alkyl, alkoxyalkyl, alkylamino, alkenyl, alkynyl, alkoxy, cycloalkenyl, cycloalkyl, cycloalkylalkyl, heterocycloalkyl, heteroaryl, C1-C6 hydrocarbyl, aryl or substituted aryl groups. Preferably, the alkyl group has 1 to 12 carbons. More preferably it is a lower alkyl of from about 1 to 7 carbons, more preferably about 1 to 4 carbons. The alkyl group can be substituted or unsubstituted. When substituted the substituted group(s) preferably comprise hydroxy, oxy, thio, amino, nitro, cyano, alkoxy, alkyl-thio, alkyl-thio-alkyl, alkoxyalkyl, alkylamino, silyl, alkenyl, alkynyl, alkoxy, cycloalkenyl, cycloalkyl, cycloalkylalkyl, heterocycloalkyl, heteroaryl, C1-C6 hydrocarbyl, aryl or substituted aryl groups. The term “alkyl” also includes alkenyl groups containing at least one carbon-carbon double bond, including straight-chain, branched-chain, and cyclic groups. Preferably, the alkenyl group has about 2 to 12 carbons. More preferably it is a lower alkenyl of from about 2 to 7 carbons, more preferably about 2 to 4 carbons. The alkenyl group can be substituted or unsubstituted. When substituted the substituted group(s) preferably comprise hydroxy, oxy, thio, amino, nitro, cyano, alkoxy, alkyl-thio, alkyl-thio-alkyl, alkoxyalkyl, alkylamino, silyl, alkenyl, alkynyl, alkoxy, cycloalkenyl, cycloalkyl, cycloalkylalkyl, heterocycloalkyl, heteroaryl, C1-C6 hydrocarbyl, aryl or substituted aryl groups.

[0239] The term “alkyl” also includes alkynyl groups containing at least one carbon-carbon triple bond, including straight-chain, branched-chain, and cyclic groups. Preferably, the alkynyl group has about 2 to 12 carbons. More preferably it is a lower alkynyl of from about 2 to 7 carbons, more preferably about 2 to 4 carbons. The alkynyl group can be substituted or unsubstituted. When substituted the substituted group(s) preferably comprise hydroxy, oxy, thio, amino, nitro, cyano, alkoxy, alkyl-thio, alkyl-thio-alkyl, alkoxyalkyl, alkylamino, silyl, alkenyl, alkynyl, alkoxy, cycloalkenyl, cycloalkyl, cycloalkylalkyl, heterocycloalkyl, heteroaryl, C1-C6 hydrocarbyl, aryl or substituted aryl groups. Alkyl groups or moieties of the invention can also include aryl, alkylaryl, carbocyclic aryl, heterocyclic aryl, amide and ester groups. The preferred substituent(s) of aryl groups are halogen, trihalomethyl, hydroxyl, SH, OH, cyano, alkoxy, alkyl, alkenyl, alkynyl, and amino groups. An “alkylaryl” group refers to an alkyl group (as described above) covalently joined to an aryl group (as described above). Carbocyclic aryl groups are groups wherein the ring atoms on the aromatic ring are all carbon atoms. The carbon atoms are optionally substituted. Heterocyclic aryl groups are groups having from about 1 to 3 heteroatoms as ring atoms in the aromatic ring and the remainder of the ring atoms are carbon atoms. Suitable heteroatoms include oxygen, sulfur, and nitrogen, and include furanyl, thienyl, pyridyl, pyrrolyl, N-lower alkyl pyrrolo, pyrimidyl, pyrazinyl, imidazolyl and the like, all optionally substituted. An “amide”refers to an —C(O)—NH—R, where R is either alkyl, aryl, alkylaryl or hydrogen. An “ester” refers to an —C(O)—OR′, where R is either alkyl, aryl, alkylaryl or hydrogen.

[0240] The term “alkoxyalkyl” as used herein refers to an alkyl-O-alkyl ether, for example, methoxyethyl or ethoxymethyl.

[0241] The term “alkyl-thio-alkyl” as used herein refers to an alkyl-S-alkyl thioether, for example, methylthiomethyl or methylthioethyl.

[0242] The term “amino” as used herein refers to a nitrogen containing group as is known in the art derived from ammonia by the replacement of one or more hydrogen radicals by organic radicals. For example, the terms “aminoacyl” and “aminoalkyl” refer to specific N-substituted organic radicals with acyl and alkyl substituent groups respectively.

[0243] The term “amination” as used herein refers to a process in which an amino group or substituted amine is introduced into an organic molecule.

[0244] The term “exocyclic amine protecting moiety” as used herein refers to a nucleobase amino protecting group compatible with oligonucleotide synthesis, for example, an acyl or amide group.

[0245] The term “alkenyl” as used herein refers to a straight or branched hydrocarbon of a designed number of carbon atoms containing at least one carbon-carbon double bond. Examples of “alkenyl” include vinyl, allyl, and 2-methyl-3-heptene.

[0246] The term “alkoxy” as used herein refers to an alkyl group of indicated number of carbon atoms attached to the parent molecular moiety through an oxygen bridge. Examples of alkoxy groups include, for example, methoxy, ethoxy, propoxy and isopropoxy.

[0247] The term “alkynyl” as used herein refers to a straight or branched hydrocarbon of a designed number of carbon atoms containing at least one carbon-carbon triple bond. Examples of “alkynyl” include propargyl, propyne, and 3-hexyne.

[0248] The term “aryl” as used herein refers to an aromatic hydrocarbon ring system containing at least one aromatic ring. The aromatic ring can optionally be fused or otherwise attached to other aromatic hydrocarbon rings or non-aromatic hydrocarbon rings. Examples of aryl groups include, for example, phenyl, naphthyl, 1,2,3,4-tetrahydronaphthalene and biphenyl. Preferred examples of aryl groups include phenyl and naphthyl.

[0249] The term “cycloalkenyl” as used herein refers to a C3-C8 cyclic hydrocarbon containing at least one carbon-carbon double bond. Examples of cycloalkenyl include cyclopropenyl, cyclobutenyl, cyclopentenyl, cyclopentadiene, cyclohexenyl, 1,3-cyclohexadiene, cycloheptenyl, cycloheptatrienyl, and cyclooctenyl.

[0250] The term “cycloalkyl” as used herein refers to a C3-C8 cyclic hydrocarbon. Examples of cycloalkyl include cyclopropyl, cyclobutyl, cyclopentyl, cyclohexyl, cycloheptyl and cyclooctyl.

[0251] The term “cycloalkylalkyl,” as used herein, refers to a C3-C7 cycloalkyl group attached to the parent molecular moiety through an alkyl group, as defined above. Examples of cycloalkylalkyl groups include cyclopropylmethyl and cyclopentylethyl.

[0252] The terms “halogen” or “halo” as used herein refers to indicate fluorine, chlorine, bromine, and iodine.

[0253] The term “heterocycloalkyl,” as used herein refers to a non-aromatic ring system containing at least one heteroatom selected from nitrogen, oxygen, and sulfur. The heterocycloalkyl ring can be optionally fused to or otherwise attached to other heterocycloalkyl rings and/or non-aromatic hydrocarbon rings. Preferred heterocycloalkyl groups have from 3 to 7 members. Examples of heterocycloalkyl groups include, for example, piperazine, morpholine, piperidine, tetrahydrofuran, pyrrolidine, and pyrazole. Preferred heterocycloalkyl groups include piperidinyl, piperazinyl, morpholinyl, and pyrolidinyl.

[0254] The term “heteroaryl” as used herein refers to an aromatic ring system containing at least one heteroatom selected from nitrogen, oxygen, and sulfur. The heteroaryl ring can be fused or otherwise attached to one or more heteroaryl rings, aromatic or non-aromatic hydrocarbon rings or heterocycloalkyl rings. Examples of heteroaryl groups include, for example, pyridine, furan, thiophene, 5,6,7,8-tetrahydroisoquinoline and pyrimidine. Preferred examples of heteroaryl groups include thienyl, benzothienyl, pyridyl, quinolyl, pyrazinyl, pyrimidyl, imidazolyl, benzimidazolyl, furanyl, benzofuranyl, thiazolyl, benzothiazolyl, isoxazolyl, oxadiazolyl, isothiazolyl, benzisothiazolyl, triazolyl, tetrazolyl, pyrrolyl, indolyl, pyrazolyl, and benzopyrazolyl.

[0255] The term “C1-C6 hydrocarbyl” as used herein refers to straight, branched, or cyclic alkyl groups having 1-6 carbon atoms, optionally containing one or more carbon-carbon double or triple bonds. Examples of hydrocarbyl groups include, for example, methyl, ethyl, propyl, isopropyl, n-butyl, sec-butyl, tert-butyl, pentyl, 2-pentyl, isopentyl, neopentyl, hexyl, 2-hexyl, 3-hexyl, 3-methylpentyl, vinyl, 2-pentene, cyclopropylmethyl, cyclopropyl, cyclohexylmethyl, cyclohexyl and propargyl. When reference is made herein to C1-C6 hydrocarbyl containing one or two double or triple bonds it is understood that at least two carbons are present in the alkyl for one double or triple bond, and at least four carbons for two double or triple bonds.

[0256] By “nucleotide” is meant a heterocyclic nitrogenous base in N-glycosidic linkage with a phosphorylated sugar. Nucleotides are recognized in the art to include natural bases (standard), and modified bases well known in the art. Such bases are generally located at the 1′ position of a nucleotide sugar moiety. Nucleotides generally comprise a base, sugar and a phosphate group. The nucleotides can be unmodified or modified at the sugar, phosphate and/or base moiety, (also referred to interchangeably as nucleotide analogs, modified nucleotides, non-natural nucleotides, non-standard nucleotides and other; see for example, Usman and McSwiggen, supra; Eckstein et al., International PCT Publication No. WO 92/07065; Usman et al., International PCT Publication No. WO 93/15187; Uhlman & Peyman, supra all are hereby incorporated by reference herein. There are several examples of modified nucleic acid bases known in the art as summarized by Limbach et al., 1994, Nucleic Acids Res. 22, 2183. Some of the non-limiting examples of chemically modified and other natural nucleic acid bases that can be introduced into nucleic acids include, for example, inosine, purine, pyridin-4-one, pyridin-2-one, phenyl, pseudouracil, 2,4,6-trimethoxy benzene, 3-methyl uracil, dihydrouridine, naphthyl, aminophenyl, 5-alkylcytidines (e.g., 5-methylcytidine), 5-alkyluridines (e.g., ribothymidine), 5-halouridine (e.g., 5-bromouridine) or 6-azapyrimidines or 6-alkylpyrimidines (e.g. 6-methyluridine), propyne, quesosine, 2-thiouridine, 4-thiouridine, wybutosine, wybutoxosine, 4-acetylcytidine, 5-(carboxyhydroxymethyl)uridine, 5′-carboxymethylaminomethyl-2-thiouridine, 5-carboxymethylaminomethyluridine, beta-D-galactosylqueosine, 1-methyladenosine, 1-methylinosine, 2,2-dimethylguanosine, 3-methylcytidine, 2-methyladenosine, 2-methylguanosine, N6-methyladenosine, 7-methylguanosine, 5-methoxyaminomethyl-2-thiouridine, 5-methylaminomethyluridine, 5-methylcarbonylmethyluridine, 5-methyloxyuridine, 5-methyl-2-thiouridine, 2-methylthio-N6-isopentenyladenosine, beta-D-mannosylqueosine, uridine-5-oxyacetic acid, 2-thiocytidine, threonine derivatives and others (Burgin et aL., 1996, Biochemistry, 35, 14090; Uhlman & Peyman, supra). By “modified bases” in this aspect is meant nucleotide bases other than adenine, guanine, cytosine and uracil at 1′ position or their equivalents; such bases can be used at any position, for example, within the catalytic core of an enzymatic nucleic acid molecule and/or in the substrate-binding regions of the nucleic acid molecule.

[0257] By “nucleoside” is meant a heterocyclic nitrogenous base in N-glycosidic linkage with a sugar. Nucleosides are recognized in the art to include natural bases (standard), and modified bases well known in the art. Such bases are generally located at the 1′ position of a nucleoside sugar moiety. Nucleosides generally comprise a base and sugar group. The nucleosides can be unmodified or modified at the sugar, and/or base moiety (also referred to interchangeably as nucleoside analogs, modified nucleosides, non-natural nucleosides, non-standard nucleosides and other; see for example, Usman and McSwiggen, supra; Eckstein et al., International PCT Publication No. WO 92/07065; Usman et al., International PCT Publication No. WO 93/15187; Uhlman & Peyman, supra all are hereby incorporated by reference herein). There are several examples of modified nucleic acid bases known in the art as summarized by Limbach et al., 1994, Nucleic Acids Res. 22, 2183. Some of the non-limiting examples of chemically modified and other natural nucleic acid bases that can be introduced into nucleic acids include, inosine, purine, pyridin-4-one, pyridin-2-one, phenyl, pseudouracil, 2,4,6-trimethoxy benzene, 3-methyl uracil, dihydrouridine, naphthyl, aminophenyl, 5-alkylcytidines (e.g., 5-methylcytidine), 5-alkyluridines (e.g., ribothymidine), 5-halouridine (e.g., 5-bromouridine) or 6-azapyrimidines or 6-alkylpyrimidines (e.g. 6-methyluridine), propyne, quesosine, 2-thiouridine, 4-thiouridine, wybutosine, wybutoxosine, 4-acetylcytidine, 5-(carboxyhydroxymethyl)uridine, 5′-carboxymethylaminomethyl-2-thiouridine, 5-carboxymethylaminomethyluridine, beta-D-galactosylqueosine, 1-methyladenosine, 1-methylinosine, 2,2-dimethylguanosine, 3-methylcytidine, 2-methyladenosine, 2-methylguanosine, N6-methyladenosine, 7-methylguanosine, 5-methoxyaminomethyl-2-thiouridine, 5-methylaminomethyluridine, 5 -methylcarbonylmethyluridine, 5-methyloxyuridine, 5-methyl-2-thiouridine, 2-methylthio-N6-isopentenyladenosine, beta-D-mannosylqueosine, uridine-5-oxyacetic acid, 2-thiocytidine, threonine derivatives and others (Burgin et al., 1996, Biochemistry, 35, 14090; Uhlman & Peyman, supra). By “modified bases” in this aspect is meant nucleoside bases other than adenine, guanine, cytosine and uracil at 1′ position or their equivalents; such bases can be used at any position, for example, within the catalytic core of an enzymatic nucleic acid molecule and/or in the substrate-binding regions of the nucleic acid molecule.

[0258] In one embodiment, the invention features modified enzymatic nucleic acid molecules with phosphate backbone modifications comprising one or more phosphorothioate, phosphorodithioate, methylphosphonate, morpholino, amidate carbamate, carboxymethyl, acetamidate, polyamide, sulfonate, sulfonamide, sulfamate, formacetal, thioformacetal, and/or alkylsilyl, substitutions. For a review of oligonucleotide backbone modifications see Hunziker and Leumann, 1995, Nucleic Acid Analogues: Synthesis and Properties, in Modern Synthetic Methods, VCH, 331-417, and Mesmaeker et al., 1994, Novel Backbone Replacements for Oligonucleotides, in Carbohydrate Modifications in Antisense Research, ACS, 24-39. These references are hereby incorporated by reference herein.

[0259] By “abasic” is meant sugar moieties lacking a base or having other chemical groups in place of a base at the 1′ position, for example a 3′,3′-linked or 5′,5′-linked deoxyabasic ribose derivative (for more details see Wincott et al., International PCT publication No. WO 97/26270).

[0260] By “unmodified nucleoside” is meant one of the bases adenine, cytosine, guanine, thymine, uracil joined to the 1′ carbon of β-D-ribo-furanose.

[0261] By “modified nucleoside” is meant any nucleotide base which contains a modification in the chemical structure of an unmodified nucleotide base, sugar and/or phosphate.

[0262] In connection with 2′-modified nucleotides as described for the present invention, by “amino” is meant 2′—NH₂ or 2′—O—NH_{2,} which can be modified or unmodified. Such modified groups are described, for example, in Eckstein et al., U.S. Pat. No. 5,672,695 and Matulic-Adamic et al., WO 98/28317, respectively, which are both incorporated by reference in their entireties.

[0263] Various modifications to nucleic acid (e.g., DNAzyme) structure can be made to enhance the utility of these molecules. For example, such modifications can enhance shelf-life, half-life in vitro, stability, and ease of introduction of such oligonucleotides to the target site, including e.g., enhancing penetration of cellular membranes and conferring the ability to recognize and bind to targeted cells.

[0264] Use of these molecules can lead to better treatment of the disease progression by affording the possibility of combination therapies (e.g., multiple enzymatic nucleic acid molecules targeted to different genes, enzymatic nucleic acid molecules coupled with known small molecule inhibitors, or intermittent treatment with combinations of enzymatic nucleic acid molecules (including different enzymatic nucleic acid molecule motifs) and/or other chemical or biological molecules). The treatment of subjects with nucleic acid molecules can also include combinations of different types of nucleic acid molecules. Therapies can be devised which include a mixture of enzymatic nucleic acid molecules (including different enzymatic nucleic acid molecule motifs), antisense and/or 2-5A chimera molecules to one or more targets to alleviate symptoms of a disease.

[0265] Administration of Nucleic Acid Molecules

[0266] Methods for the delivery of nucleic acid molecules are described in Akhtar et al., 1992, Trends Cell Bio., 2, 139; and Delivery Strategies for Antisense Oligonucleotide Therapeutics, ed. Akhtar, 1995, which are both incorporated herein by reference. Sullivan et al., PCT WO 94/02595, further describes the general methods for delivery of enzymatic RNA molecules. These protocols can be utilized for the delivery of virtually any nucleic acid molecule. Nucleic acid molecules can be administered to cells by a variety of methods known to those familiar to the art, including, but not restricted to, encapsulation in liposomes, by iontophoresis, or by incorporation into other vehicles, such as hydrogels, cyclodextrins, biodegradable nanocapsules, and bioadhesive microspheres. Alternatively, the nucleic acid/vehicle combination is locally delivered by direct injection or by use of an infusion pump. Other routes of delivery include, but are not limited to oral (tablet or pill form) and/or intrathecal delivery (Gold, 1997, Neuroscience, 76, 1153-1158). Other approaches include the use of various transport and carrier systems, for example though the use of conjugates and biodegradable polymers. For a comprehensive review on drug delivery strategies including CNS delivery, see Ho et al., 1999, Curr. Opin. Mol. Ther., 1, 336-343 and Jain, Drug Delivery Systems: Technologies and Commercial Opportunities, Decision Resources, 1998 and Groothuis et al., 1997, J. NeuroVirol., 3, 387-400. More detailed descriptions of nucleic acid delivery and administration are provided in Sullivan et al., supra, Draper et al., PCT WO93/23569, Beigelman et al., PCT WO99/05094, and Klimuk et al., PCT WO99/04819, all of which have been incorporated by reference herein.

[0267] The molecules of the instant invention can be used as pharmaceutical agents. Pharmaceutical agents prevent, inhibit the occurrence, or treat (alleviate a symptom to some extent, preferably all of the symptoms) of a disease state in a subject.

[0268] The negatively charged polynucleotides of the invention can be administered (e.g., RNA, DNA or protein) and introduced into a subject by any standard means described herein and known in the art, with or without stabilizers, buffers, and the like, to form a pharmaceutical composition. When it is desired to use a liposome delivery mechanism, standard protocols for formation of liposomes can be followed. The compositions of the present invention can also be formulated and used as tablets, capsules or elixirs for oral administration; suppositories for rectal administration; sterile solutions; suspensions for injectable administration; and the other compositions known in the art.

[0269] The present invention also includes pharmaceutically acceptable formulations of the compounds described. These formulations include salts of the above compounds, e.g., acid addition salts, for example, salts of hydrochloric, hydrobromic, acetic acid, and benzene sulfonic acid.

[0270] A pharmacological composition or formulation refers to a composition or formulation in a form suitable for administration, e.g., systemic administration, into a cell or subject, preferably a human. Suitable forms, in part, depend upon the use or the route of entry, for example oral, transdermal, or by injection. Such forms should not prevent the composition or formulation from reaching a target cell (i.e., a cell to which the negatively charged polymer is desired to be delivered to). For example, pharmacological compositions injected into the blood stream should be soluble. Other factors are known in the art, and include considerations such as toxicity and forms which prevent the composition or formulation from exerting its effect.

[0271] By “systemic administration” is meant in vivo systemic absorption or accumulation of drugs in the blood stream followed by distribution throughout the entire body. Administration routes which lead to systemic absorption include, without limitations: intravenous, subcutaneous, intraperitoneal, inhalation, oral, intrapulmonary and intramuscular. Each of these administration routes expose the desired negatively charged polymers, e.g., nucleic acids, to an accessible diseased tissue. The rate of entry of a drug into the circulation has been shown to be a function of molecular weight or size. The use of a liposome or other drug carrier comprising the compounds of the instant invention can potentially localize the drug, for example, in certain tissue types, such as the tissues of the reticular endothelial system (RES). A liposome formulation that can facilitate the association of drug with the surface of cells, such as, lymphocytes and macrophages is also useful. This approach can provide enhanced delivery of the drug to target cells by taking advantage of the specificity of macrophage and lymphocyte immune recognition of abnormal cells, such as cancer cells.

[0272] By pharmaceutically acceptable formulation is meant, a composition or formulation that allows for the effective distribution of the nucleic acid molecules of the instant invention in the physical location most suitable for their desired activity. Non-limiting examples of agents suitable for formulation with the nucleic acid molecules of the instant invention include: PEG conjugated nucleic acids, phospholipid conjugated nucleic acids, nucleic acids containing lipophilic moieties, phosphorothioates, P-glycoprotein inhibitors (such as Pluronic P85) which can enhance entry of drugs into various tissues, for exaple the CNS (Jolliet-Riant and Tillement, 1999, Fundam. Clin. Pharmacol., 13, 16-26); biodegradable polymers, such as poly (DL-lactide-coglycolide) microspheres for sustained release delivery after implantation (Emerich, DF et al, 1999, Cell Transplant, 8, 47-58) Alkermes, Inc. Cambridge, Mass.; and loaded nanoparticles, such as those made of polybutylcyanoacrylate, which can deliver drugs across the blood brain barrier and can alter neuronal uptake mechanisms (Prog Neuropsychopharmacol Biol Psychiatry, 23, 941-949, 1999). Other non-limiting examples of delivery strategies, including CNS delivery of the nucleic acid molecules of the instant invention include material described in Boado et al., 1998, J. Pharm. Sci., 87, 1308-1315; Tyler et al., 1999, FEBS Lett., 421, 280-284; Pardridge et al., 1995, PNAS USA., 92, 5592-5596; Boado, 1995, Adv. Drug Delivery Rev., 15, 73-107; Aldrian-Herrada et al., 1998, Nucleic Acids Res., 26, 4910-4916; and Tyler et al., 1999, PNAS USA., 96, 7053-7058. All these references are hereby incorporated herein by reference.

[0273] The invention also features the use of the composition comprising surface-modified liposomes containing poly (ethylene glycol) lipids (PEG-modified, or long-circulating liposomes or stealth liposomes). Nucleic acid molecules of the invention can also comprise covalently attached PEG molecules of various molecular weights. These formulations offer a method for increasing the accumulation of drugs in target tissues. This class of drug carriers resists opsonization and elimination by the mononuclear phagocytic system (MPS or RES), thereby enabling longer blood circulation times and enhanced tissue exposure for the encapsulated drug (Lasic et al. Chem. Rev. 1995, 95, 2601-2627; Ishiwata et al., Chem. Pharm. Bull. 1995, 43, 1005-1011). Such liposomes have been shown to accumulate selectively in tumors, presumably by extravasation and capture in the neovascularized target tissues (Lasic et al., Science 1995, 267, 1275-1276; Oku et al.,1995, Biochim. Biophys. Acta, 1238, 86-90). The long-circulating liposomes enhance the pharmacokinetics and pharmacodynamics of DNA and RNA, particularly compared to conventional cationic liposomes, which are known to accumulate in tissues of the MPS (Liu et al., J. Biol. Chem. 1995, 42, 24864-24870; Choi et al., International PCT Publication No. WO 96/10391; Ansell et al., International PCT Publication No. WO 96/10390; Holland et al., International PCT Publication No. WO 96/10392; all of which are incorporated by reference herein). Long-circulating liposomes are also likely to protect drugs from nuclease degradation to a greater extent compared to cationic liposomes, based on their ability to avoid accumulation in metabolically aggressive MPS tissues such as the liver and spleen. All of these references are incorporated by reference herein.

[0274] The present invention also includes compositions prepared for storage or administration that include a pharmaceutically effective amount of the desired compounds in a pharmaceutically acceptable carrier or diluent. Acceptable carriers or diluents for therapeutic use are well known in the pharmaceutical art, and are described, for example, in Remington's Pharmaceutical Sciences, Mack Publishing Co. (A. R. Gennaro edit. 1985), hereby incorporated by reference herein. For example, preservatives, stabilizers, dyes and flavoring agents can be provided. These include sodium benzoate, sorbic acid and esters of p-hydroxybenzoic acid. In addition, antioxidants and suspending agents can be used.

[0275] A pharmaceutically effective dose is that dose required to prevent, inhibit the occurrence, or treat (alleviate a symptom to some extent, preferably all of the symptoms) of a disease state. The pharmaceutically effective dose depends on the type of disease, the composition used, the route of administration, the type of mammal being treated, the physical characteristics of the specific mammal under consideration, concurrent medication, and other factors which those skilled in the medical arts will recognize. Generally, an amount between 0.1 mg/kg and 100 mg/kg body weight/day of active ingredients is administered dependent upon potency of the negatively charged polymer.

[0276] The nucleic acid molecules of the invention and formulations thereof can be administered orally, topically, parenterally, by inhalation or spray, or rectally in dosage unit formulations containing conventional non-toxic pharmaceutically acceptable carriers, adjuvants and/or vehicles. The term parenteral as used herein includes percutaneous, subcutaneous, intravascular (e.g., intravenous), intramuscular, or intrathecal injection or infusion techniques and the like. In addition, there is provided a pharmaceutical formulation comprising a nucleic acid molecule of the invention and a pharmaceutically acceptable carrier. One or more nucleic acid molecules of the invention can be present in association with one or more non-toxic pharmaceutically acceptable carriers and/or diluents and/or adjuvants, and if desired other active ingredients. The pharmaceutical compositions containing nucleic acid molecules of the invention can be in a form suitable for oral use, for example, as tablets, troches, lozenges, aqueous or oily suspensions, dispersible powders or granules, emulsion, hard or soft capsules, or syrups or elixirs.

[0277] Compositions intended for oral use can be prepared according to any method known to the art for the manufacture of pharmaceutical compositions and such compositions can contain one or more such sweetening agents, flavoring agents, coloring agents or preservative agents in order to provide pharmaceutically elegant and palatable preparations. Tablets contain the active ingredient in admixture with non-toxic pharmaceutically acceptable excipients that are suitable for the manufacture of tablets. These excipients can be, for example, inert diluents, such as calcium carbonate, sodium carbonate, lactose, calcium phosphate or sodium phosphate; granulating and disintegrating agents, for example, corn starch, or alginic acid; binding agents, for example starch, gelatin or acacia, and lubricating agents, for example magnesium stearate, stearic acid or talc. The tablets can be uncoated or they can be coated by known techniques. In some cases such coatings can be prepared by known techniques to delay disintegration and absorption in the gastrointestinal tract and thereby provide a sustained action over a longer period. For example, a time delay material such as glyceryl monosterate or glyceryl distearate can be employed.

[0278] Formulations for oral use can also be presented as hard gelatin capsules wherein the active ingredient is mixed with an inert solid diluent, for example, calcium carbonate, calcium phosphate or kaolin, or as soft gelatin capsules wherein the active ingredient is mixed with water or an oil medium, for example peanut oil, liquid paraffin or olive oil.

[0279] Aqueous suspensions contain the active materials in admixture with excipients suitable for the manufacture of aqueous suspensions. Such excipients are suspending agents, for example, sodium carboxymethylcellulose, methylcellulose, hydropropyl-methylcellulose, sodium alginate, polyvinylpyrrolidone, gum tragacanth and gum acacia; dispersing or wetting agents can be a naturally-occurring phosphatide, for example, lecithin, or condensation products of an alkylene oxide with fatty acids, for example polyoxyethylene stearate, or condensation products of ethylene oxide with long chain aliphatic alcohols, for example heptadecaethyleneoxycetanol, or condensation products of ethylene oxide with partial esters derived from fatty acids and a hexitol such as polyoxyethylene sorbitol monooleate, or condensation products of ethylene oxide with partial esters derived from fatty acids and hexitol anhydrides, for example polyethylene sorbitan monooleate. The aqueous suspensions can also contain one or more preservatives, for example, ethyl, or n-propyl p-hydroxybenzoate, one or more coloring agents, one or more flavoring agents, and one or more sweetening agents, such as sucrose or saccharin.

[0280] Oily suspensions can be formulated by suspending the active ingredients in a vegetable oil, for example arachis oil, olive oil, sesame oil or coconut oil, or in a mineral oil such as liquid paraffin. The oily suspensions can contain a thickening agent, for example beeswax, hard paraffin or cetyl alcohol. Sweetening agents and flavoring agents can be added to provide palatable oral preparations. These compositions can be preserved by the addition of an anti-oxidant such as ascorbic acid.

[0281] Dispersible powders and granules suitable for preparation of an aqueous suspension by the addition of water provide the active ingredient in admixture with a dispersing or wetting agent, suspending agent and one or more preservatives. Suitable dispersing or wetting agents or suspending agents are exemplified by those already mentioned above. Additional excipients, for example sweetening, flavoring and coloring agents, can also be present.

[0282] Pharmaceutical compositions of the invention can also be in the form of oil-in-water emulsions. The oily phase can be a vegetable oil or a mineral oil or mixtures of these. Suitable emulsifying agents can be naturally-occurring gums, for example gum acacia or gum tragacanth, naturally-occurring phosphatides, for example soy bean, lecithin, and esters or partial esters derived from fatty acids and hexitol, anhydrides, for example, sorbitan monooleate, and condensation products of the said partial esters with ethylene oxide, for example polyoxyethylene sorbitan monooleate. The emulsions can also contain sweetening and flavoring agents.

[0283] Syrups and elixirs can be formulated with sweetening agents, for example glycerol, propylene glycol, sorbitol, glucose or sucrose. Such formulations can also contain a demulcent, a preservative and flavoring and coloring agents. The pharmaceutical compositions can be in the form of a sterile injectable aqueous or oleaginous suspension. This suspension can be formulated according to the known art using those suitable dispersing or wetting agents and suspending agents that have been mentioned above. The sterile injectable preparation can also be a sterile injectable solution or suspension in a non-toxic parentally acceptable diluent or solvent, for example as a solution in 1,3-butanediol. Among the acceptable vehicles and solvents that can be employed are water, Ringer's solution and isotonic sodium chloride solution. In addition, sterile, fixed oils are conventionally employed as a solvent or suspending medium. For this purpose any bland fixed oil can be employed including synthetic mono-or diglycerides. In addition, fatty acids such as oleic acid find use in the preparation of injectables.

[0284] The nucleic acid molecules of the invention can also be administered in the form of suppositories, e.g., for rectal administration of the drug. These compositions can be prepared by mixing the drug with a suitable non-irritating excipient that is solid at ordinary temperatures but liquid at the rectal temperature and will therefore melt in the rectum to release the drug. Such materials include cocoa butter and polyethylene glycols.

[0285] Nucleic acid molecules of the invention can be administered parenterally in a sterile medium. The drug, depending on the vehicle and concentration used, can either be suspended or dissolved in the vehicle. Advantageously, adjuvants such as local anesthetics, preservatives and buffering agents can be dissolved in the vehicle.

[0286] Dosage levels of the order of from about 0.1 mg to about 140 mg per kilogram of body weight per day are useful in the treatment of the above-indicated conditions (about 0.5 mg to about 7 g per patient or subject per day). The amount of active ingredient that can be combined with the carrier materials to produce a single dosage form varies depending upon the host treated and the particular mode of administration. Dosage unit forms generally contain between from about 1 mg to about 500 mg of an active ingredient.

[0287] It is understood that the specific dose level for any particular patient or subject depends upon a variety of factors including the activity of the specific compound employed, the age, body weight, general health, sex, diet, time of administration, route of administration, and rate of excretion, drug combination and the severity of the particular disease undergoing therapy.

[0288] For administration to non-human animals, the composition can also be added to the animal feed or drinking water. It can be convenient to formulate the animal feed and drinking water compositions so that the animal takes in a therapeutically appropriate quantity of the composition along with its diet. It can also be convenient to present the composition as a premix for addition to the feed or drinking water.

[0289] The nucleic acid molecules of the present invention can also be administered to a patient or subject in combination with other therapeutic compounds to increase the overall therapeutic effect. The use of multiple compounds to treat an indication can increase the beneficial effects while reducing the presence of side effects.

[0290] In another aspect of the invention, nucleic acid molecules of the present invention are preferably expressed from transcription units (see for example Couture et al., 1996, TIG., 12, 510, Skillern et al., International PCT Publication No. WO 00/22113, Conrad, International PCT Publication No. WO 00/22114, and Conrad, U.S. Pat. No. 6,054,299) inserted into DNA or RNA vectors. The recombinant vectors are preferably DNA plasmids or viral vectors. Enzymatic nucleic acid expressing viral vectors can be constructed based on, but not limited to, adeno-associated virus, retrovirus, adenovirus, or alphavirus. Preferably, the recombinant vectors capable of expressing the nucleic acid molecules are delivered as described above, and persist in target cells. Alternatively, viral vectors can be used that provide for transient expression of nucleic acid molecules. Such vectors can be repeatedly administered as necessary. Once expressed, the nucleic acid molecule binds to the target mRNA. Delivery of nucleic acid molecule expressing vectors can be systemic, such as by intravenous or intra-muscular administration, by administration to target cells ex-planted from the subject followed by reintroduction into the subject, or by any other means that would allow for introduction into the desired target cell (for a review see Couture et al., 1996, TIG., 12, 510).

[0291] One aspect of the invention features an expression vector comprising a nucleic acid sequence encoding at least one of the nucleic acid molecules of the instant invention. The nucleic acid sequence encoding the nucleic acid molecule of the instant invention is operably linked in a manner that allows expression of that nucleic acid molecule.

[0292] Another aspect the invention features an expression vector comprising nucleic acid sequence encoding at least one of the nucleic acid molecules of the invention, in a manner which allows expression of that nucleic acid molecule. The expression vector comprises in one embodiment; a) a transcription initiation region; b) a transcription termination region; c) a nucleic acid sequence encoding at least one said nucleic acid molecule; and wherein said sequence is operably linked to said initiation region and said termination region, in a manner that allows expression and/or delivery of said nucleic acid molecule.

[0293] In another embodiment, the expression vector comprises: a) a transcription initiation region; b) a transcription termination region; c) an open reading frame; d) a nucleic acid sequence encoding at least one said nucleic acid molecule, wherein said sequence is operably linked to the 3′-end of said open reading frame; and wherein said sequence is operably linked to said initiation region, said open reading frame and said termination region, in a manner which allows expression and/or delivery of said nucleic acid molecule. In yet another embodiment the expression vector comprises: a) a transcription initiation region; b) a transcription termination region; c) an intron; d) a nucleic acid sequence encoding at least one said nucleic acid molecule; and wherein said sequence is operably linked to said initiation region, said intron and said termination region, in a manner which allows expression and/or delivery of said nucleic acid molecule.

[0294] In another embodiment, the expression vector comprises: a) a transcription initiation region; b) a transcription termination region; c) an intron; d) an open reading frame; e) a nucleic acid sequence encoding at least one said nucleic acid molecule, wherein said sequence is operably linked to the 3′-end of said open reading frame; and wherein said sequence is operably linked to said initiation region, said intron, said open reading frame and said termination region, in a manner which allows expression and/or delivery of said nucleic acid molecule.

### EXAMPLES

[0295] The following are non-limiting examples showing the selection, isolation, synthesis and activity of nucleic acids of the instant invention.

### Example 1

### Identification of Potential Target Sites in Human Ras RNA

[0296] The sequence of human Ras genes were screened for accessible sites using a computer-folding algorithm. Regions of the RNA that do not form secondary folding structures and contain potential enzymatic nucleic acid molecule and/or antisense binding/cleavage sites were identified. The sequences of K-Ras and H-Ras binding/cleavage sites are shown in Tables II and III.

### Example 2

### Selection of Enzymatic Nucleic Acid Cleavage Sites in Human Ras RNA

[0297] Enzymatic nucleic acid molecule target sites were chosen by analyzing sequences of Human K-Ras and H-Ras (for example, Genbank accession Nos: NM_{—}004985 and NM_{—}005343 respectively) and prioritizing the sites on the basis of folding. Enzymatic nucleic acid molecules were designed that can bind each target and were individually analyzed by computer folding (Christoffersen et al., 1994 J. Mol. Struc. Theochem, 311, 273; Jaeger et al., 1989, Proc. Natl. Acad. Sci. USA, 86, 7706) to assess whether the enzymatic nucleic acid molecule sequences fold into the appropriate secondary structure. Those enzymatic nucleic acid molecules with unfavorable intramolecular interactions between the binding arms and the catalytic core are eliminated from consideration. As noted below, varying binding arm lengths can be chosen to optimize activity. Generally, at least 5 bases on each arm are able to bind to, or otherwise interact with, the target RNA.

### Example 3

### Chemical Synthesis and Purification of Enzymatic Nucleic Acid Molecules for Efficient Cleavage and/or Blocking of Ras RNA

[0298] DNAzyme molecules are designed to anneal to various sites in the RNA message. The binding arms of the DNAzyme molecules are complementary to the target site sequences described above. The DNAzymes were chemically synthesized. The method of synthesis used followed the procedure for nucleic acid synthesis as described herein and in Usman et al., (1987 J. Am. Chem. Soc., 109, 7845), Scaringe et al., (1990 Nucleic Acids Res., 18, 5433) and Wincott et al., supra, and made use of common nucleic acid protecting and coupling groups, such as dimethoxytrityl at the 5′-end, and phosphoramidites at the 3′-end. The average stepwise coupling yields were typically >98%. The sequences of the chemically synthesized DNAzyme molecules used in this study are shown below in Tables II and III.

### Example 4

### DNAzyme Cleavage of Ras RNA Target in vitro

[0299] DNAzymes targeted to the human K-Ras and H-Ras RNA are designed and synthesized as described above. These enzymatic nucleic acid molecules can be tested for cleavage activity in vitro, for example, using the following procedure. The target sequences and the nucleotide location within the K-Ras and H-Ras RNA are given in Tables II and III respectively.

[0300] Cleavage Reactions:

[0301] DNAzymes and substrates were synthesized in 96-well format using 0.2 μmol scale. Substrates were 5′-³²P labeled and gel purified using 7.5% polyacrylamide gels, and eluting into water. Assays were done by combining trace substrate with 500 nM DNAzyme or greater, and initiated by adding final concentrations of 40 mM Mg⁺², and 50 mM Tris-Cl pH 8.0. For each DNAzyme/substrate combination a control reaction was done to ensure cleavage was not the result of non-specific substrate degradation. A single three hour time point was taken and run on a 15% polyacrylamide gel to asses cleavage activity. Gels were dried and scanned using a Molecular Dynamics Phosphorimager and quantified using Molecular Dynamics ImageQuant software. Percent cleaved was determined by dividing values for cleaved substrate bands by full-length (uncleaved) values plus cleaved values and multiplying by 100 (%cleaved=[C/(U+C)]*100).

### Example 5

### DNAzyme Cleavage of Ras RNA Target in vivo

[0302] Cell Culture

[0303] Wickstrom, 2001, Mol. Biotechnol., 18, 35-35, describes a cell culture system in which antisense oligonucleotides targeting H-Ras were studied in transformed mouse cells that form solid tumors. Treatment of cells with antisense targeting H-Ras resulted in the sequence specific and dose dependent inhibition of H-Ras expression. In this study, it was determined that antisense targeting the first intron region of H-Ras were more effective than antisense targeting the initiation codon region.

[0304] Kita et al., 1999, Int. J. Cancer, 80, 553-558, describes the growth inhibition of human pancreatic cancer cell lines by antisense oligonucleotides specific to mutated K-Ras genes. Antisense oligonucleotides were transfected to the transformed cells using liposomes. Cellular proliferation, K-Ras mRNA expression, and K-Ras protein synthesis were all evaluated as endpoints. Sato et al., 2000, Cancer Lett., 155, 153-161, describes another human pancreatic cancer cell line, HOR-P1, that is characterized by high angiogenic activity and metastatic potential. Genetic and molecular analysis of this cell line revealed both increased telomerase activity and a mutation in the K-Ras oncogene.

[0305] A variety of endpoints have been used in cell culture models to look at Ras-mediated effects after treatment with anti-Ras agents. Phenotypic endpoints include inhibition of cell proliferation, RNA expression, and reduction of Ras protein expression. Because Ras oncogene mutations are directly associated with increased proliferation of cetain tumor cells, a proliferation endpoint for cell culture assays is preferably used as the primary screen. There are several methods by which this endpoint can be measured. Following treatment of cells with DNAzymes, cells are allowed to grow (typically 5 days) after which either the cell viability, the incorporation of [³H] thymidine into cellular DNA and/or the cell density can be measured. The assay of cell density is done in a 96-well format using commercially available fluorescent nucleic acid stains (such as Syto® 13 or CyQuant®). As a secondary, confirmatory endpoint a DNAzyme-mediated decrease in the level of Ras protein expression is evaluated using a Ras-specific ELISA.

[0306] Animal Models

[0307] Evaluating the efficacy of anti-Ras agents in animal models is an important prerequisite to human clinical trials. As in cell culture models, the most Ras sensitive mouse tumor xenografts are those derived from cancer cells that express mutant Ras proteins. Nude mice bearing H-Ras transformed bladder cancer cell xenografts were sensitive to an anti-Ras antisense nucleic acid, resulting in an 80% inhibition of tumor growth after a 31 day treatment period (Wickstrom, 2001, Mol. Biotechnol., 18, 35-35). Zhang et al., 2000, Gene Ther., 7, 2041, describes an anti-K-Ras ribozyme adenoviral vector (KRbz-ADV) targeting a K-Ras mutant (K-Ras codon 12 GGT to GTT; H441 and H1725 cells respectively). Non-small cell lung cancer cells (NSCLC H441 and H1725 cells) that express the mutant K-Ras protein were used in nude mouse xenografts compared to NSCLC H1650 cells that lack the relevant mutation. Pre-treatment with KRbz-ADV completely abrogated engraftment of both H441 and H1725 cells and compared to 100% engraftment and tumor growth in animals that received untreated tumor cells or a control vector. The above studies provide proof that inhibition of Ras expression by anti-Ras agents causes inhibition of tumor growth in animals. Anti-Ras DNAzymes chosen from in vitro assays are further tested in similar mouse xenograft models. Active DNAzymes are subsequently tested in combination with standard chemotherapies.

[0308] Indications

[0309] Particular degenerative and disease states that are associated with Ras expression modulation include but are not limited to cancer, for example lung cancer, colorectal cancer, bladder cancer, pancreatic cancer, breast cancer, prostate cancer and/or any other diseases or conditions that are related to or will respond to the levels of Ras in a cell or tissue, alone or in combination with other therapies.

[0310] The present body of knowledge in Ras research indicates the need for methods to assay Ras activity and for compounds that can regulate Ras expression for research, diagnostic, and therapeutic use.

[0311] The use of monoclonal antibodies, chemotherapy, radiation therapy, and analgesics, are all non-limiting examples of methods that can be combined with or used in conjunction with the nucleic acid molecules (e.g. DNAzymes) of the instant invention. Common chemotherapies that can be combined with nucleic acid molecules of the instant invention include various combinations of cytotoxic drugs to kill cancer cells. These drugs include but are not limited to paclitaxel (Taxol), docetaxel, cisplatin, methotrexate, cyclophosphamide, doxorubin, fluorouracil carboplatin, edatrexate, gemcitabine, vinorelbine etc. Those skilled in the art will recognize that other drug compounds and therapies can be similarly be readily combined with the nucleic acid molecules of the instant invention (e.g. DNAzyme molecules) are hence within the scope of the instant invention.

[0312] Diagnostic Uses

[0313] The nucleic acid molecules of this invention (e.g., enzymatic nucleic acid molecules) are used as diagnostic tools to examine genetic drift and mutations within diseased cells or to detect the presence of Ras RNA in a cell. The close relationship between enzymatic nucleic acid molecule activity and the structure of the target RNA allows the detection of mutations in any region of the molecule that alters the base-pairing and three-dimensional structure of the target RNA. Using multiple enzymatic nucleic acid molecules described in this invention, one maps nucleotide changes which are important to RNA structure and function in vitro, as well as in cells and tissues. Cleavage of target RNAs with enzymatic nucleic acid molecules are used to inhibit gene expression and define the role (essentially) of specified gene products in the progression of disease. In this manner, other genetic targets are defined as important mediators of the disease. These experiments lead to better treatment of the disease progression by affording the possibility of combinational therapies (e.g., multiple enzymatic nucleic acid molecules targeted to different genes, enzymatic nucleic acid molecules coupled with known small molecule inhibitors, or intermittent treatment with combinations of enzymatic nucleic acid molecules and/or other chemical or biological molecules). Other in vitro uses of enzymatic nucleic acid molecules of this invention are known in the art, and include detection of the presence of mRNAs associated with Ras-related condition. Such RNA is detected by determining the presence of a cleavage product after treatment with an enzymatic nucleic acid molecule using standard methodology.

[0314] In a specific example, enzymatic nucleic acid molecules that cleave only wild-type or mutant forms of the target RNA are used for the assay. The first enzymatic nucleic acid molecule is used to identify wild-type RNA present in the sample and the second enzymatic nucleic acid molecule is used to identify mutant RNA in the sample. As reaction controls, synthetic substrates of both wild-type and mutant RNA are cleaved by both enzymatic nucleic acid molecules to demonstrate the relative enzymatic nucleic acid molecule efficiencies in the reactions and the absence of cleavage of the “non-targeted” RNA species. The cleavage products from the synthetic substrates also serve to generate size markers for the analysis of wild-type and mutant RNAs in the sample population. Thus each analysis requires two enzymatic nucleic acid molecules, two substrates and one unknown sample which is combined into six reactions. The presence of cleavage products is determined using an RNAse protection assay so that full-length and cleavage fragments of each RNA can be analyzed in one lane of a polyacrylamide gel. It is not absolutely required to quantify the results to gain insight into the expression of mutant RNAs and putative risk of the desired phenotypic changes in target cells. The expression of mRNA whose protein product is implicated in the development of the phenotype (i.e., Ras) is adequate to establish risk. If probes of comparable specific activity are used for both transcripts, then a qualitative comparison of RNA levels will be adequate and will decrease the cost of the initial diagnosis. Higher mutant form to wild-type ratios are correlated with higher risk whether RNA levels are compared qualitatively or quantitatively. The use of enzymatic nucleic acid molecules in diagnostic applications contemplated by the instant invention is described, for example, in George et al., U.S. Pat. Nos. 5,834,186 and 5,741,679, Shih et al., U.S. Pat. No. 5,589,332, Nathan et al., U.S. Pat. No 5,871,914, Nathan and Ellington, International PCT publication No. WO 00/24931, Breaker et al., International PCT Publication Nos. WO 00/26226 and 98/27104, and Sullenger et al., International PCT publication No. WO 99/29842.

### Example 6

### Identification of Potential Target Sites in Human HIV RNA

[0315] The sequence of human HIV genes are screened for accessible sites using a computer-folding algorithm. Regions of the RNA that do not form secondary folding structures and contained potential enzymatic nucleic acid molecule and/or antisense binding/cleavage sites are identified. The sequences of these binding/cleavage sites are shown in Tables VI to XI.

### Example 6

### Selection of Enzymatic Nucleic Acid Cleavage Sites in Human HIV RNA

[0316] Enzymatic nucleic acid molecule target sites were chosen by analyzing sequences of Human HIV (Genbank accession No: NM_{—}005228) and prioritizing the sites on the basis of folding. Enzymatic nucleic acid molecules were designed that can bind each target and are individually analyzed by computer folding (Christoffersen et al., 1994 J. Mol. Struc. Theochem, 311, 273; Jaeger et al., 1989, Proc. Natl. Acad. Sci. USA, 86, 7706) to assess whether the enzymatic nucleic acid molecule sequences fold into the appropriate secondary structure. Those enzymatic nucleic acid molecules with unfavorable intramolecular interactions between the binding arms and the catalytic core were eliminated from consideration. As noted below, varying binding arm lengths can be chosen to optimize activity. Generally, at least 5 bases on each arm are able to bind to, or otherwise interact with, the target RNA.

### Example 8

### Chemical Synthesis and Purification of Ribozymes and Antisense for Efficient Cleavage and/or Blocking of HIV Activity

[0317] Enzymatic nucleic acid molecules and antisense constructs are designed to anneal to various sites in the RNA message. The binding arms of the enzymatic nucleic acid molecules are complementary to the target site sequences described above, while the antisense constructs are fully complementary to the target site sequences described above. The enzymatic nucleic acid molecules and antisense constructs were chemically synthesized. The method of synthesis used followed the procedure for normal RNA synthesis as described above and in Usman et al., (1987 J. Am. Chem. Soc., 109, 7845), Scaringe et al., (1990 Nucleic Acids Res., 18, 5433) and Wincott et al., supra, and made use of common nucleic acid protecting and coupling groups, such as dimethoxytrityl at the 5′-end, and phosphoramidites at the 3′-end. The average stepwise coupling yields were typically >98%.

[0318] Enzymatic nucleic acid molecules and antisense constructs are also synthesized from DNA templates using bacteriophage T7 RNA polymerase (Milligan and Uhlenbeck, 1989, Methods Enzymol. 180, 51). Enzymatic nucleic acid molecules and antisense constructs are purified by gel electrophoresis using general methods or are purified by high pressure liquid chromatography (HPLC; See Wincott et al., supra; the totality of which is hereby incorporated herein by reference) and are resuspended in water. The sequences of the chemically synthesized enzymatic nucleic acid molecules used in this study are shown below in Table XI. The sequences of the chemically synthesized antisense constructs used in this study are complementary sequences to the Substrate sequences shown below as in Tables VI to XI.

### Example 8

### Enzymatic Nucleic Acid Molecule Cleavage of HIV RNA Target in vitro

[0319] Enzymatic nucleic acid molecules targeted to the human HIV RNA are designed and synthesized as described above. These enzymatic nucleic acid molecules are tested for cleavage activity in vitro, for example, using the following procedure. The target sequences and the nucleotide location within the HIV RNA are given in Tables VI to XI.

[0320] Cleavage Reactions: Full-length or partially full-length, internally-labeled target RNA for enzymatic nucleic acid molecule cleavage assay is prepared by in vitro transcription in the presence of [a-³²p] CTP, passed over a G 50 Sephadex column by spin chromatography and used as substrate RNA without further purification. Alternately, substrates are 5′-³²P-end labeled using T4 polynucleotide kinase enzyme. Assays are performed by pre-warming a 2× concentration of purified enzymatic nucleic acid molecule in enzymatic nucleic acid molecule cleavage buffer (50 mM Tris-HCl, pH 7.5 at 37° C., 10 mM MgCl₂) and the cleavage reaction was initiated by adding the 2× enzymatic nucleic acid molecule mix to an equal volume of substrate RNA (maximum of 1-5 nM) that was also pre-warmed in cleavage buffer. As an initial screen, assays are carried out for 1 hour at 37° C. using a final concentration of either 40 nM or 1 mM enzymatic nucleic acid molecule, i.e., enzymatic nucleic acid molecule excess. The reaction is quenched by the addition of an equal volume of 95% formamide, 20 mM EDTA, 0.05% bromophenol blue and 0.05% xylene cyanol after which the sample is heated to 95° C. for 2 minutes, quick chilled and loaded onto a denaturing polyacrylamide gel. Substrate RNA and the specific RNA cleavage products generated by enzymatic nucleic acid molecule cleavage are visualized on an autoradiograph of the gel. The percentage of cleavage is determined by Phosphor Imager® quantitation of bands representing the intact substrate and the cleavage products.

[0321] Indications

[0322] Particular degenerative and disease states that can be associated with HIV expression modulation include but are not limited to acquired immunodeficiency disease (AIDS) and related diseases and conditions, including but not limited to Kaposi's sarcoma, lymphoma, cervical cancer, squamous cell carcinoma, cardiac myopathy, rheumatic diseases, and opportunistic infection, for example Pneumocystis carinii, Cytomegalovirus, Herpes simplex, Mycobacteria, Cryptococcus, Toxoplasma, Progressive multifocal leucoencepalopathy (Papovavirus), Mycobacteria, Aspergillus, Cryptococcus, Candida, Cryptosporidium, Isospora belli, Microsporidia and any other diseases or conditions that are related to or will respond to the levels of HIV in a cell or tissue, alone or in combination with other therapies

[0323] The present body of knowledge in HIV research indicates the need for methods to assay HIV activity and for compounds that can regulate HIV expression for research, diagnostic, and therapeutic use.

[0324] The use of antiviral compounds, monoclonal antibodies, chemotherapy, radiation therapy, analgesics, and/or anti-inflammatory compounds, are all non-limiting examples of a methods that can be combined with or used in conjunction with the nucleic acid molecules (e.g. ribozymes and antisense molecules) of the instant invention. Examples of antiviral compounds that can be used in conjunction with the nucleic acid molecules of the invention include but are not limited to AZT (also known as zidovudine or ZDV), ddC (zalcitabine), ddl (dideoxyinosine), d4T (stavudine), and 3TC (lamivudine) Ribavirin, delvaridine (Rescriptor), nevirapine (Viramune), efravirenz (Sustiva), ritonavir (Norvir), saquinivir (Invirase), indinavir (Crixivan), amprenivir (Agenerase), nelfinavir (Viracept), and/or lopinavir (Kaletra). Common chemotherapies that can be combined with nucleic acid molecules of the instant invention include various combinations of cytotoxic drugs to kill cancer cells. These drugs include but are not limited to paclitaxel (Taxol), docetaxel, cisplatin, methotrexate, cyclophosphamide, doxorubin, fluorouracil carboplatin, edatrexate, gemcitabine, vinorelbine etc. Those skilled in the art will recognize that other drug compounds and therapies can be similarly be readily combined with the nucleic acid molecules of the instant invention (e.g. ribozymes and antisense molecules) are hence within the scope of the instant invention.

[0325] Diagnostic uses

[0326] The nucleic acid molecules of this invention (e.g., enzymatic nucleic acid molecules) are used as diagnostic tools to examine genetic drift and mutations within diseased cells or to detect the presence of HIV RNA in a cell. The close relationship between enzymatic nucleic acid molecule activity and the structure of the target RNA allows the detection of mutations in any region of the molecule which alters the base-pairing and three-dimensional structure of the target RNA. Using multiple enzymatic nucleic acid molecules described in this invention, one maps nucleotide changes which are important to RNA structure and function in vitro, as well as in cells and tissues. Cleavage of target RNAs with enzymatic nucleic acid molecules are used to inhibit gene expression and define the role (essentially) of specified gene products in the progression of disease. In this manner, other genetic targets are defined as important mediators of the disease. These experiments lead to better treatment of the disease progression by affording the possibility of combinational therapies (e.g., multiple enzymatic nucleic acid molecules targeted to different genes, enzymatic nucleic acid molecules coupled with known small molecule inhibitors, or intermittent treatment with combinations of enzymatic nucleic acid molecules and/or other chemical or biological molecules). Other in vitro uses of enzymatic nucleic acid molecules of this invention are well known in the art, and include detection of the presence of mRNAs associated with HIV-related condition. Such RNA is detected by determining the presence of a cleavage product after treatment with an enzymatic nucleic acid molecule using standard methodology.

[0327] In a specific example, enzymatic nucleic acid molecules which cleave only wild-type or mutant forms of the target RNA are used for the assay. The first enzymatic nucleic acid molecule is used to identify wild-type RNA present in the sample and the second enzymatic nucleic acid molecule is used to identify mutant RNA in the sample. As reaction controls, synthetic substrates of both wild-type and mutant RNA are cleaved by both enzymatic nucleic acid molecules to demonstrate the relative enzymatic nucleic acid molecule efficiencies in the reactions and the absence of cleavage of the “non-targeted” RNA species. The cleavage products from the synthetic substrates also serve to generate size markers for the analysis of wild-type and mutant RNAs in the sample population. Thus each analysis requires two enzymatic nucleic acid molecules, two substrates and one unknown sample which is combined into six reactions. The presence of cleavage products is determined using an RNAse protection assay so that full-length and cleavage fragments of each RNA can be analyzed in one lane of a polyacrylamide gel. It is not absolutely required to quantify the results to gain insight into the expression of mutant RNAs and putative risk of the desired phenotypic changes in target cells. The expression of mRNA whose protein product is implicated in the development of the phenotype (i.e., HIV) is adequate to establish risk. If probes of comparable specific activity are used for both transcripts, then a qualitative comparison of RNA levels will be adequate and will decrease the cost of the initial diagnosis. Higher mutant form to wild-type ratios are correlated with higher risk whether RNA levels are compared qualitatively or quantitatively. The use of enzymatic nucleic acid molecules in diagnostic applications contemplated by the instant invention is more fully described in George et al., U.S. Pat. Nos. 5,834,186 and 5,741,679, Shih et al., U.S. Pat. No. 5,589,332, Nathan et al., U.S. Pat. No 5,871,914, Nathan and Ellington, International PCT publication No. WO 00/24931, Breaker et al., International PCT Publication Nos. WO 00/26226 and 98/27104, and Sullenger et al., International PCT publication No. WO 99/29842.

### Example 10

### Identification of Potential Target Sites in Human HER2 RNA

[0328] The sequence of human HER2 genes were screened for accessible sites using a computer-folding algorithm. Regions of the RNA that do not form secondary folding structures and contained potential enzymatic nucleic acid molecule and/or antisense binding/cleavage sites were identified. The sequences of these binding/cleavage sites are shown in Tables IV and V.

### Example 10

### Selection of Enzymatic Nucleic Acid Cleavage Sites in Human HER2 RNA

[0329] Enzymatic nucleic acid molecule target sites were chosen by analyzing sequences of Human HER2 (Genbank accession No: X03363) and prioritizing the sites on the basis of folding. Enzymatic nucleic acid molecules were designed that can bind each target and are individually analyzed by computer folding (Christoffersen et al., 1994 J. Mol. Struc. Theochem, 311, 273; Jaeger et al., 1989, Proc. Natl. Acad. Sci. USA, 86, 7706) to assess whether the enzymatic nucleic acid molecule sequences fold into the appropriate secondary structure. Those enzymatic nucleic acid molecules with unfavorable intramolecular interactions between the binding arms and the catalytic core were eliminated from consideration. As noted below, variable binding arm lengths are chosen to optimize activity. Generally, at least 5 bases on each arm are able to bind to, or otherwise interact with, the target RNA.

### Example 12

### Chemical Synthesis and Purification of Ribozymes and Antisense for Efficient Cleavage and/or Blocking of HER2 Expression

[0330] DNAzyme molecules are designed to anneal to various sites in the RNA message. The binding arms of the DNAzyme molecules are complementary to the target site sequences described above. The DNAzymes were chemically synthesized. The method of synthesis used followed the procedure for nucleic acid synthesis as described above and in Usman et al., (1987 J. Am. Chem. Soc., 109, 7845), Scaringe et al., (1990 Nucleic Acids Res., 18, 5433) and Wincott et al., supra, and made use of common nucleic acid protecting and coupling groups, such as dimethoxytrityl at the 5′-end, and phosphoramidites at the 3′-end. The average stepwise coupling yields were typically >98%. The sequences of the chemically synthesized DNAzyme molecules used in this study are shown below in Table V.

### Example 13

### DNAzyme Cleavage of HER2 RNA Target in vitro

[0331] DNAzymes targeted to the human HER2 RNA are designed and synthesized as described above. These enzymatic nucleic acid molecules can be tested for cleavage activity in vitro, for example, using the following procedure. The target sequences and the nucleotide location within the HER2 RNA are given in Tables IV and V.

[0332] Cleavage Reactions:

[0333] Ribozymes and substrates were synthesized in 96-well format using 0.2 μmol scale. Substrates were 5′-32P labeled and gel purified using 7.5% polyacrylamide gels, and eluting into water. Assays were done by combining trace substrate with 500 nM Ribozyme or greater, and initiated by adding final concentrations of 40 mM Mg⁺², and 50 mM Tris-Cl pH 8.0. For each ribozyme/substrate combination a control reaction was done to ensure cleavage was not the result of non-specific substrate degradation. A single three hour time point was taken and run on a 15% polyacrylamide gel to asses cleavage activity. Gels were dried and scanned using a Molecular Dynamics Phosphorimager and quantified using Molecular Dynamics ImageQuant software. Percent cleaved was determined by dividing values for cleaved substrate bands by full-length (uncleaved) values plus cleaved values and multiplying by 100 (% cleaved=[C/(U+C)]*100).

### Example 14

### DNAzyme Cleavage of HER2 RNA Target in vivo

[0334] Cell Culture Review

[0335] The greatest HER2 specific effects have been observed in cancer cell lines that express high levels of HER2 protein (as measured by ELISA). Specifically, in one study that treated five human breast cancer cell lines with the HER2 antibody (anti-erbB2-sFv), the greatest inhibition of cell growth was seen in three cell lines (MDA-MB-361, SKBR-3 and BT-474) that express high levels of HER2 protein. No inhibition of cell growth was observed in two cell lines (MDA-MB-231 and MCF-7) that express low levels of HER2 protein (Wright, M., Grim, J., Deshane, J., Kim, M., Strong, T. V., Siegel, G. P., Curiel, D. T. (1997) An intracellular anti-erbB-2 single-chain antibody is specifically cytotoxic to human breast carcinoma cells overexpressing erbB-2. Gene Therapy 4: 317-322). Another group successfully used SKBR-3 cells to show HER2 antisense oligonucleotide-mediated inhibition of HER2 protein expression and HER2 RNA knockdown (Vaughn, J. P., Iglehart, J. D., Demirdji, S., Davis, P., Babiss, L. E., Caruthers, M. H., Marks, J. R. (1995) Antisense DNA downregulation of the ERBB2 oncogene measured by a flow cytometric assay. Proc Natl Acad Sci USA 92: 8338-8342). Other groups have also demonstrated a decrease in the levels of HER2 protein, HER2 mRNA and/or cell proliferation in cultured cells using anti-HER2 DNAzymes or antisense molecules (Suzuki T., Curcio, L. D., Tsai, J. and Kashani-Sabet M. (1997) Anti-c-erb-B-2 Ribozyme for Breast Cancer. In Methods in Molecular Medicine, Vol. 11, Therapeutic Applications of Ribozmes, Human Press, Inc., Totowa, N.J.; Weichen, K., Zimmer, C. and Dietel, M. (1997) Selection of a high activity c-erbB-2 ribozyme using a fusion gene of c-erbB-2 and the enhanced green fluorescent protein. Cancer Gene Therapy 5: 45-51; Czubayko, F., Downing, S. G., Hsieh, S. S., Goldstein, D. J., Lu P. Y., Trapnell, B. C. and Wellstein, A. (1997) Adenovirus-mediated transduction of ribozymes abrogates HER-2/neu and pleiotrophin expression and inhibits tumor cell proliferation. Gene Ther. 4: 943-949; Colomer, R., Lupu, R., Bacus, S. S. and Gelmann, E. P. (1994) erbB-2 antisense oligonucloetides inhibit the proliferation of breast carcinoma cells with erbB-2 oncogene amplification. British J. Cancer 70: 819-825; Betram et al., 1994). Because cell lines that express higher levels of HER2 have been more sensitive to anti-HER2 agents, we prefer using several medium to high expressing cell lines, including SKBR-3 and T47D, for DNAzyme screens in cell culture.

[0336] A variety of endpoints have been used in cell culture models to look at HER2-mediated effects after treatment with anti-HER2 agents. Phenotypic endpoints include inhibition of cell proliferation, apoptosis assays and reduction of HER2 protein expression. Because overexpression of HER2 is directly associated with increased proliferation of breast and ovarian tumor cells, a proliferation endpoint for cell culture assays will preferably be used as the primary screen. There are several methods by which this endpoint can be measured. Following treatment of cells with DNAzymes, cells are allowed to grow (typically 5 days) after which either the cell viability, the incorporation of [³H] thymidine into cellular DNA and/or the cell density can be measured. The assay of cell density is very straightforward and can be done in a 96-well format using commercially available fluorescent nucleic acid stains (such as Syto® 13 or CyQuant®). The assay using CyQuant® is described herein and is currently being employed to screen ˜100 DNAzymes targeting HER2 (details below).

[0337] As a secondary, confirmatory endpoint a DNAzyme-mediated decrease in the level of HER2 protein expression can be evaluated using a HER2-specific ELISA.

[0338] Validation of Cell Lines and DNAzyme Treatment Conditions

[0339] Two human breast cancer cell lines (T47D and SKBR-3) that are known to express medium to high levels of HER2 protein, respectively, are considered for DNAzyme screening. In order to validate these cell lines for HER2-mediated sensitivity, both cell lines are treated with the HER2 specific antibody, Herceptin® (Genentech) and its effect on cell proliferation is determined. Herceptin® is added to cells at concentrations ranging from 0-8 μM in medium containing either no serum (OptiMem), 0.1% or 0.5% FBS and efficacy is determined via cell proliferation. Maximal inhibition of proliferation (˜50%) in both cell lines is typically observed after addition of Herceptin® at 0.5 nM in medium containing 0.1% or no FBS. The fact that both cell lines are sensitive to an anti-HER2 agent (Herceptin®) supports their use in experiments testing anti-HER2 DNAzymes.

[0340] Prior to DNAzyrne screening, the choice of the optimal lipid(s) and conditions for DNAzyme delivery is determined empirically for each cell line. Applicant has established a panel of cationic lipids (lipids as described in PCT application WO99/05094) that can be used to deliver DNAzymes to cultured cells and are very useful for cell proliferation assays that are typically 3-5 days in length. (Additional description of useful lipids is provided above, and those skilled in the art are also familiar with a variety of lipids that can be used for delivery of oligonucleotide to cells in culture.) Initially, this panel of lipid delivery vehicles is screened in SKBR-3 and T47D cells using previously established control oligonucleotides. Specific lipids and conditions for optimal delivery are selected for each cell line based on these screens. These conditions are used to deliver HER2 specific DNAzymes to cells for primary (inhibition of cell proliferation) and secondary (decrease in HER2 protein) efficacy endpoints.

[0341] Primary Screen: Inhibition of Cell Proliferation

[0342] DNAzyme screens are performed using an automated, high throughput 96-well cell proliferation assay. Cell proliferation is measured over a 5-day treatment period using the nucleic acid stain CyQuant® for determining cell density. The growth of cells treated with DNAzyme/lipid complexes is compared to both untreated cells and to cells treated with Scrambled-arm Attenuated core Controls. SACs can no longer bind to the target site due to the scrambled arm sequence and have nucleotide changes in the core that greatly diminish DNAzyme cleavage. These SACs are used to determine non-specific inhibition of cell growth caused by DNAzyme chemistry (i.e. multiple 2′ O-Me modified nucleotides and a 3′ inverted abasic). Lead DNAzymes are chosen from the primary screen based on their ability to inhibit cell proliferation in a specific manner. Dose response assays are carried out on these leads and a subset was advanced into a secondary screen using the level of HER2 protein as an endpoint.

[0343] Secondary Screen: Decrease in HER2 Protein and/or RNA

[0344] A secondary screen that measures the effect of anti-HER2 DNAzymes on HER2 protein and/or RNA levels is used to affirm preliminary findings. A robust HER2 ELISA for both T47D and SKBR-3 cells has been established and is available for use as an additional endpoint. In addition, a real time RT-PCR assay (TaqMan assay) has been developed to assess HER2 RNA reduction compared to an actin RNA control. Dose response activity of nucleic acid molecules of the instant invention can be used to assess both HER2 protein and RNA reduction endpoints.

[0345] DNAzyme Mechanism Assays

[0346] A TaqMan® assay for measuring the DNAzyme-mediated decrease in HER2 RNA has also been established. This assay is based on PCR technology and can measure in real time the production of HER2 mRNA relative to a standard cellular MRNA such as GAPDH. This RNA assay is used to establish proof that lead DNAzymes are working through an RNA cleavage mechanism and result in a decrease in the level of HER2 mRNA, thus leading to a decrease in cell surface HER2 protein receptors and a subsequent decrease in tumor cell proliferation.

[0347] Animal Models

[0348] Evaluating the efficacy of anti-HER2 agents in animal models is an important prerequisite to human clinical trials. As in cell culture models, the most HER2 sensitive mouse tumor xenografts are those derived from human breast carcinoma cells that express high levels of HER2 protein. In a recent study, nude mice bearing BT-474 xenografts were sensitive to the anti-HER2 humanized monoclonal antibody Herceptin®, resulting in an 80% inhibition of tumor growth at a 1 mg kg dose (ip, 2×week for 4-5 weeks). Tumor eradication was observed in 3 of 8 mice treated in this manner (Baselga, J., Norton, L. Albanell, J., Kim, Y. M. and Mendelsohn, J. (1998) Recombinant humanized anti-HER2 antibody (Herceptin) enhances the antitumor activity of paclitaxel and doxorubicin against HER2/neu overexpressing human breast cancer xenografts. Cancer Res. 15: 2825-2831). This same study compared the efficacy of Herceptin® alone or in combination with the commonly used chemotherapeutics, paclitaxel or doxorubicin. Although, all three anti-HER2 agents caused modest inhibition of tumor growth, the greatest antitumor activity was produced by the combination of Herceptin® and paclitaxel (93% inhibition of tumor growth vs 35% with paclitaxel alone). The above studies provide proof that inhibition of HER2 expression by anti-HER2 agents causes inhibition of tumor growth in animals. Lead anti-HER2 DNAzymes chosen from in vitro assays are further tested in mouse xenograft models. DNAzymes are first tested alone and then in combination with standard chemotherapies.

[0349] Animal Model Development

[0350] Three human breast tumor cell lines (T47D, SKBR-3 and BT-474) were characterized to establish their growth curves in mice. These three cell lines have been implanted into the mammary papillae of both nude and SCID mice and primary tumor volumes are measured 3 times per week. Growth characteristics of these tumor lines using a Matrigel implantation format can also be established. The use of two other breast cell lines that have been engineered to express high levels of HER2 can also be used in the described studies. The tumor cell line(s) and implantation method that supports the most consistent and reliable tumor growth is used in animal studies testing the lead HER2 DNAzyme(s). DNAzymes are administered by daily subcutaneous injection or by continuous subcutaneous infusion from Alzet mini osmotic pumps beginning 3 days after tumor implantation and continuing for the duration of the study. Group sizes of at least 10 animals are employed. Efficacy is determined by statistical comparison of tumor volume of DNAzyme-treated animals to a control group of animals treated with saline alone. Because the growth of these tumors is generally slow (45-60 days), an initial endpoint is the time in days it takes to establish an easily measurable primary tumor (i.e. 50-100 mm³) in the presence or absence of DNAzyme treatment.

[0351] Clinical Summary

[0352] Overview

[0353] Breast cancer is a common cancer in women and also occurs in men to a lesser degree. The incidence of breast cancer in the United States is ˜180,000 cases per year and ˜46,000 die each year of the disease. In addition, 21,000 new cases of ovarian cancer per year lead to ˜13,000 deaths (data from Hung, M.-C., Matin, A., Zhang, Y., Xing, X., Sorgi, F., Huang, L. and Yu, D. (1995) HER-2/neu-targeting gene therapy—a review. Gene 159: 65-71 and the Surveillance, Epidemiology and End Results Program, NCI Surveillance, Epidemiology and End Results Program (SEER) Cancer Statistics Review: http://www.seer.ims.nci.nih.gov/Publications/CSR1973_{—}1996/). Ovarian cancer is a potential secondary indication for anti-HER2 DNAzyme therapy.

[0354] A full review of breast cancer is given in the NCI PDQ for Breast Cancer (NCI PDQ/Treatment/Health Professionals/Breast Cancer: http://cancernet.nci.nih.gov/clinpdq/soa/Breast_cancer_Physician.html; NCI PDQ/Treatment/Patients/Breast Cancer: http://cancernet.nci.nih.gov/clinpdq/pif/Breast_cancer_Patient.html). A brief overview is given here. Breast cancer is evaluated or “staged” on the basis of tumor size, and whether it has spread to lymph nodes and/or other parts of the body. In Stage I breast cancer, the cancer is no larger than 2 centimeters and has not spread outside of the breast. In Stage II, the patient's tumor is 2-5 centimeters but cancer may have spread to the axillary lymph nodes. By Stage III, metastasis to the lymph nodes is typical, and tumors are ≧5 centimeters. Additional tissue involvement (skin, chest wall, ribs, muscles etc.) may also be noted. Once cancer has spread to additional organs of the body, it is classed as Stage IV.

[0355] Almost all breast cancers (>90%) are detected at Stage I or II, but 31% of these are already lymph node positive. The 5-year survival rate for node negative patients (with standard surgery/radiation/chemotherapy/hormone regimens) is 97%; however, involvement of the lymph nodes reduces the 5-year survival to only 77%. Involvement of other organs (≧Stage III) drastically reduces the overall survival, to 22% at 5 years. Thus, chance of recovery from breast cancer is highly dependent on early detection. Because up to 10% of breast cancers are hereditary, those with a family history are considered to be at high risk for breast cancer and should be monitored very closely.

[0356] Therapy

[0357] Breast cancer is highly treatable and often curable when detected in the early stages. (For a complete review of breast cancer treatments, see the NCI PDQ for Breast Cancer.) Common therapies include surgery, radiation therapy, chemotherapy and hormonal therapy. Depending upon many factors, including the tumor size, lymph node involvement and location of the lesion, surgical removal varies from lumpectomy (removal of the tumor and some surrounding tissue) to mastectomy (removal of the breast, lymph nodes and some or all of the underlying chest muscle). Even with successful surgical resection, as many as 21% of the patients may ultimately relapse (10-20 years). Thus, once local disease is controlled by surgery, adjuvant radiation treatments, chemotherapies and/or hormonal therapies are typically used to reduce the rate of recurrence and improve survival. The therapy regimen employed depends not only on the stage of the cancer at its time of removal, but other variables such the type of cancer (ductal or lobular), whether lymph nodes were involved and removed, age and general health of the patient and if other organs are involved.

[0358] Common chemotherapies include various combinations of cytotoxic drugs to kill the cancer cells. These drugs include paclitaxel (Taxol), docetaxel, cisplatin, methotrexate, cyclophosphamide, doxorubin, fluorouracil etc. Significant toxicities are associated with these cytotoxic therapies. Well-characterized toxicities include nausea and vomiting, myelosuppression, alopecia and mucosity. Serious cardiac problems are also associated with certain of the combinations, e.g. doxorubin and paclitaxel, but are less common.

[0359] Testing for estrogen and progesterone receptors helps to determine whether certain anti-hormone therapies might be helpful in inhibiting tumor growth. If either or both receptors are present, therapies to interfere with the action of the hormone ligands, can be given in combination with chemotherapy and are generally continued for several years. These adjuvant therapies are called SERMs, selective estrogen receptor modulators, and they can give beneficial estrogen-like effects on bone and lipid metabolism while antagonizing estrogen in reproductive tissues. Tamoxifen is one such compound. The primary toxic effect associated with the use of tamoxifen is a 2 to 7-fold increase in the rate of endometrial cancer. Blood clots in the legs and lung and the possibility of stroke are additional side effects. However, tamoxifen has been determined to reduce breast cancer incidence by 49% in high-risk patients and an extensive, somewhat controversial, clinical study is underway to expand the prophylactic use of tamoxifen. Another SERM, raloxifene, was also shown to reduce the incidence of breast cancer in a large clinical trial where it was being used to treat osteoporosis. In additional studies, removal of the ovaries and/or drugs to keep the ovaries from working are being tested.

[0360] Bone marrow transplantation is being studied in clinical trials for breast cancers that have become resistant to traditional chemotherapies or where >3 lymph nodes are involved. Marrow is removed from the patient prior to high-dose chemotherapy to protect it from being destroyed, and then replaced after the chemotherapy. Another type of “transplant” involves the exogenous treatment of peripheral blood stem cells with drugs to kill cancer cells prior to replacing the treated cells in the bloodstream.

[0361] One biological treatment, a humanized monoclonal anti-HER2 antibody, Herceptin® (Genentech) has been approved by the FDA as an additional treatment for HER2 positive tumors. Herceptin® binds with high affinity to the extracellular domain of HER2 and thus blocks its signaling action. Herceptin® can be used alone or in combination with chemotherapeutics (i.e. paclitaxel, docetaxel, cisplatin, etc.) (Pegram, M. D., Lipton, A., Hayes, D. F., Weber, B. L., Baselga, J. M., Tripathy, D., Baly, D., Baughman, S. A., Twaddell, T., Glaspy, J. A. and Slamon, D. J. (1998) Phase II study of receptor-enhanced chemosensitivity using recombinant humanized anti-p185HER2/neu monoclonal antibody plus cisplatin in patients with HER2/neu-overexpressing metastatic breast cancer refractory to chemotherapy treatment. J. Clin. Oncol. 16: 2659-2671). In Phase III studies, Herceptin® significantly improved the response rate to chemotherapy as well as improving the time to progression (Ross, J. S. and Fletcher, J. A. (1998) The HER-2/neu oncogene in breast cancer: Prognostic factor, predictive factor and target for therapy. Oncologist 3: 1998). The most common side effects attributed to Herceptin® are fever and chills, pain, asthenia, nausea, vomiting, increased cough, diarrhea, headache, dyspnea, infection, rhinitis, and insomnia. Herceptin® in combination with chemotherapy (paclitaxel) can lead to cardiotoxicity (Sparano, J. A. (1999) Doxorubicin/taxane combinations: Cardiac toxicity and pharmacokinetics. Semin. Oncol. 26: 14-19), leukopenia, anemia, diarrhea, abdominal pain and infection.

[0362] HER2 Protein Levels for Patient Screening and as a Potential Endpoint

[0363] Because elevated HER2 levels can be detected in at least 30% of breast cancers, breast cancer patients can be pre-screened for elevated HER2 prior to admission to initial clinical trials testing an anti-HER2 DNAzyme. Initial HER2 levels can be determined (by ELISA) from tumor biopsies or resected tumor samples.

[0364] During clinical trials, it may be possible to monitor circulating HER2 protein by ELISA (Ross and Fletcher, 1998). Evaluation of serial blood/serum samples over the course of the anti-HER2 DNAzyme treatment period could be useful in determining early indications of efficacy. In fact, the clinical course of Stage IV breast cancer was correlated with shed HER2 protein fragment following a dose-intensified paclitaxel monotherapy. In all responders, the HER2 serum level decreased below the detection limit (Luftner, D., Schnabel. S. and Possinger, K. (1999) c-erbB-2 in serum of patients receiving fractionated paclitaxel chemotherapy. Int. J Biol. Markers 14: 55-59).

[0365] Two cancer-associated antigens, CA27.29 and CA15.3, can also be measured in the serum. Both of these glycoproteins have been used as diagnostic markers for breast cancer. CA27.29 levels are higher than CA15.3 in breast cancer patients; the reverse is true in healthy individuals. Of these two markers, CA27.29 was found to better discriminate primary cancer from healthy subjects. In addition, a statistically significant and direct relationship was shown between CA27.29 and large vs small tumors and node postive vs node negative disease (Gion, M., Mione, R., Leon, A. E. and Dittadi, R. (1999) Comparison of the diagnostic accuracy of CA27.29 and CA15.3 in primary breast cancer. Clin. Chem. 45: 630-637). Moreover, both cancer antigens were found to be suitable for the detection of possible metastases during follow-up (Rodriguez de Paterna, L., Arnaiz, F., Estenoz, J. Ortuno, B. and Lanzos E. (1999) Study of serum tumor markers CEA, CA15.3, CA27.29 as diagnostic parameters in patients with breast carcinoma. Int. J. Biol. Markers 10: 24-29). Thus, blocking breast tumor growth may be reflected in lower CA27.29 and/or CA15.3 levels compared to a control group. FDA submissions for the use of CA27.29 and CA15.3 for monitoring metastatic breast cancer patients have been filed (reviewed in Beveridge, R. A. (1999) Review of clinical studies of CA27.29 in breast cancer management. Int. J. Biol. Markers 14: 36-39). Fully automated methods for measurement of either of these markers are commercially available.

[0366] Indications

[0367] Particular degenerative and disease states that can be associated with HER2 expression modulation include but are not limited to cancer, for example breast cancer and ovarian cancer and/or any other diseases or conditions that are related to or will respond to the levels of HER2 in a cell or tissue, alone or in combination with other therapies

[0368] The present body of knowledge in HER2 research indicates the need for methods to assay HER2 activity and for compounds that can regulate HER2 expression for research, diagnostic, and therapeutic use.

[0369] The use of monoclonal antibodies, chemotherapy, radiation therapy, and analgesics, are all non-limiting examples of methods that can be combined with or used in conjunction with the nucleic acid molecules (e.g. DNAzymes) of the instant invention. Common chemotherapies that can be combined with nucleic acid molecules of the instant invention include various combinations of cytotoxic drugs to kill cancer cells. These drugs include but are not limited to paclitaxel (Taxol), docetaxel, cisplatin, methotrexate, cyclophosphamide, doxorubin, fluorouracil carboplatin, edatrexate, gemcitabine, vinorelbine etc. Those skilled in the art will recognize that other drug compounds and therapies can be similarly be readily combined with the nucleic acid molecules of the instant invention (e.g. DNAzyme molecules) are hence within the scope of the instant invention.

[0370] Diagnostic Uses

[0371] The nucleic acid molecules of this invention (e.g., enzymatic nucleic acid molecules) can be used as diagnostic tools to examine genetic drift and mutations within diseased cells or to detect the presence of HER2 RNA in a cell. The close relationship between enzymatic nucleic acid molecule activity and the structure of the target RNA allows the detection of mutations in any region of the molecule that alters the base-pairing and three-dimensional structure of the target RNA. By using multiple enzymatic nucleic acid molecules described in this invention, one can map nucleotide changes which are important to RNA structure and function in vitro, as well as in cells and tissues. Cleavage of target RNAs with enzymatic nucleic acid molecules can be used to inhibit gene expression and define the role (essentially) of specified gene products in the progression of disease. In this manner, other genetic targets can be defined as important mediators of the disease. These experiments can lead to better treatment of the disease progression by affording the possibility of combinational therapies (e.g., multiple enzymatic nucleic acid molecules targeted to different genes, enzymatic nucleic acid molecules coupled with known small molecule inhibitors, or intermittent treatment with combinations of enzymatic nucleic acid molecules and/or other chemical or biological molecules). Other in vitro uses of enzymatic nucleic acid molecules of this invention are well known in the art, and include detection of the presence of mRNAs associated with HER2-related condition. Such RNA is detected by determining the presence of a cleavage product after treatment with an enzymatic nucleic acid molecule using standard methodology.

[0372] In a specific example, enzymatic nucleic acid molecules that cleave only wild-type or mutant forms of the target RNA are used for the assay. The first enzymatic nucleic acid molecule is used to identify wild-type RNA present in the sample and the second enzymatic nucleic acid molecule is used to identify mutant RNA in the sample. As reaction controls, synthetic substrates of both wild-type and mutant RNA are cleaved by both enzymatic nucleic acid molecules to demonstrate the relative enzymatic nucleic acid molecule efficiencies in the reactions and the absence of cleavage of the “non-targeted” RNA species. The cleavage products from the synthetic substrates also serve to generate size markers for the analysis of wild-type and mutant RNAs in the sample population. Thus each analysis requires two enzymatic nucleic acid molecules, two substrates and one unknown sample which is combined into six reactions. The presence of cleavage products is determined using an RNAse protection assay so that full-length and cleavage fragments of each RNA can be analyzed in one lane of a polyacrylamide gel. It is not absolutely required to quantify the results to gain insight into the expression of mutant RNAs and putative risk of the desired phenotypic changes in target cells. The expression of mRNA whose protein product is implicated in the development of the phenotype (i.e., HER2) is adequate to establish risk. If probes of comparable specific activity are used for both transcripts, then a qualitative comparison of RNA levels will be adequate and will decrease the cost of the initial diagnosis. Higher mutant form to wild-type ratios are correlated with higher risk whether RNA levels are compared qualitatively or quantitatively. The use of enzymatic nucleic acid molecules in diagnostic applications contemplated by the instant invention is more fully described in George et al., U.S. Pat. Nos. 5,834,186 and 5,741,679, Shih et al., U.S. Pat. No. 5,589,332, Nathan et al., U.S. Pat. No 5,871,914, Nathan and Ellington, International PCT publication No. WO 00/24931, Breaker et al., International PCT Publication Nos. WO 00/26226 and 98/27104, and Sullenger et al., International PCT publication No. WO 99/29842.

[0373] Additional Uses

[0374] Potential uses of sequence-specific enzymatic nucleic acid molecules of the instant invention can have many of the same applications for the study of RNA that DNA restriction endonucleases have for the study of DNA (Nathans et al., 1975 Ann. Rev. Biochem. 44:273). For example, the pattern of restriction fragments can be used to establish sequence relationships between two related RNAs, and large RNAs can be specifically cleaved to fragments of a size more useful for study. The ability to engineer sequence specificity of the enzymatic nucleic acid molecule is ideal for cleavage of RNAs of unknown sequence. Applicant has described the use of nucleic acid molecules to modulate gene expression of target genes in bacterial, microbial, fungal, viral, and eukaryotic systems including plant or mammalian cells.

[0375] All patents and publications mentioned in the specification are indicative of the levels of skill of those skilled in the art to which the invention pertains. All references cited in this disclosure are incorporated by reference to the same extent as if each reference had been incorporated by reference in its entirety individually.

[0376] One skilled in the art would readily appreciate that the present invention is well adapted to carry out the objects and obtain the ends and advantages mentioned, as well as those inherent therein. The methods and compositions described herein as presently representative of preferred embodiments are exemplary and are not intended as limitations on the scope of the invention. Changes therein and other uses will occur to those skilled in the art, which are encompassed within the spirit of the invention, are defined by the scope of the claims.

[0377] It will be readily apparent to one skilled in the art that varying substitutions and modifications can be made to the invention disclosed herein without departing from the scope and spirit of the invention. Thus, such additional embodiments are within the scope of the present invention and the following claims.

[0378] The invention illustratively described herein suitably can be practiced in the absence of any element or elements, limitation or limitations which is not specifically disclosed herein. Thus, for example, in each instance herein any of the terms “comprising”, “consisting essentially of” and “consisting of” can be replaced with either of the other two terms. The terms and expressions that have been employed are used as terms of description and not of limitation, and there is no intention that in the use of such terms and expressions of excluding any equivalents of the features shown and described or portions thereof, but it is recognized that various modifications are possible within the scope of the invention claimed. Thus, it should be understood that although the present invention has been specifically disclosed by preferred embodiments, optional features, modification and variation of the concepts herein disclosed can be resorted to by those skilled in the art, and that such modifications and variations are considered to be within the scope of this invention as defined by the description and the appended claims.

[0379] In addition, where features or aspects of the invention are described in terms of Markush groups or other grouping of alternatives, those skilled in the art will recognize that the invention is also thereby described in terms of any individual member or subgroup of members of the Markush group or other group.

[0380] Other embodiments are within the claims that follow.

TABLE I

| | | | | | |
|---|---|---|---|---|---|
| Reagent | Equivalents | Amount | Wait Time* DNA | Wait Time* 2′-O-methyl | Wait Time*RNA |

A. 2.5 μmol Synthesis Cycle ABI 394 Instrument

| | | | | | | | | | |
|---|---|---|---|---|---|---|---|---|---|
| Phosphoramidites | 6.5 | 163 | μL | 45 | sec | 2.5 | min | 7.5 | min |
| S-Ethyl Tetrazole | 23.8 | 238 | μL | 45 | sec | 2.5 | min | 7.5 | min |
| Acetic Anhydride | 100 | 233 | μL | 5 | sec | 5 | sec | 5 | sec |
| N-Methyl | 186 | 233 | μL | 5 | sec | 5 | sec | 5 | sec |
| Imidazole | | | | | | | | | |
| TCA | 176 | 2.3 | mL | 21 | sec | 21 | sec | 21 | sec |
| Iodine | 11.2 | 1.7 | mL | 45 | sec | 45 | sec | 45 | sec |
| Beaucage | 12.9 | 645 | μL | 100 | sec | 300 | sec | 300 | sec |

| | | | | | | |
|---|---|---|---|---|---|---|
| Acetonitrile | NA | 6.67 | mL | NA | NA | NA |

B. 0.2 μmol Synthesis Cycle ABI 394 Instrument

| | | | | | | | | | |
|---|---|---|---|---|---|---|---|---|---|
| Phosphoramidites | 15 | 31 | μL | 45 | sec | 233 | sec | 465 | sec |
| S-Ethyl Tetrazole | 38.7 | 31 | μL | 45 | sec | 233 | min | 465 | sec |
| Acetic Anhydride | 655 | 124 | μL | 5 | sec | 5 | sec | 5 | sec |
| N-Methyl | 1245 | 124 | μL | 5 | sec | 5 | sec | 5 | sec |
| Imidazole | | | | | | | | | |
| TCA | 700 | 732 | μL | 10 | sec | 10 | sec | 10 | sec |
| Iodine | 20.6 | 244 | μL | 15 | sec | 15 | sec | 15 | sec |
| Beaucage | 7.7 | 232 | μL | 100 | sec | 300 | sec | 300 | sec |

| | | | | | | |
|---|---|---|---|---|---|---|
| Acetonitrile | NA | 2.64 | mL | NA | NA | NA |

C. 0.2 μmol Synthesis Cycle 96 well Instrument

| | Equivalents: DNA/ | Amount: DNA/2′-O- | | | | Wait Time* 2′-O- | | | |
|---|---|---|---|---|---|---|---|---|---|
| Reagent | 2′-O-methyl/Ribo | methyl/Ribo | | Wait Time* DNA | | methyl | | Wait Time* Ribo | |
| Phosphoramidites | 22/33/66 | 40/60/120 | μL | 60 | sec | 180 | sec | 360 | sec |
| S-Ethyl Tetrazole | 70/105/210 | 40/60/120 | μL | 60 | sec | 180 | min | 360 | sec |
| Acetic Anhydride | 265/265/265 | 50/50/50 | μL | 10 | sec | 10 | sec | 10 | sec |
| N-Methyl | 502/502/502 | 50/50/50 | μL | 10 | sec | 10 | sec | 10 | sec |
| Imidazole | | | | | | | | | |
| TCA | 238/475/475 | 250/500/500 | μL | 15 | sec | 15 | sec | 15 | sec |
| Iodine | 6.8/6.8/6.8 | 80/80/80 | μL | 30 | sec | 30 | sec | 30 | sec |
| Beaucage | 34/51/51 | 80/120/120 | | 100 | sec | 200 | sec | 200 | sec |

| | | | | | | |
|---|---|---|---|---|---|---|
| Acetonitrile | NA | 1150/1150/1150 | μL | NA | NA | NA |

*Wait time does not include contact time during delivery.

[0381] TABLE II
Human K-Ras DNAzyme and Substrate Sequence

| | | | | |
|---|---|---|---|---|
| | | Seq | | Seq |
| Pos | Substrate | ID | DNAzyme | ID |

| | | | | |
|---|---|---|---|---|
| 10 | CCUAGGCG G CGGCCGCG | 1 | CGCGGCCG GGCTAGCTACAACGA CGCCTAGG | 2329 |
| 13 | AGGCGGCG G CCGCGGCG | 2 | CGCCGCGG GGCTAGCTACAACGA CGCCGCCT | 2330 |
| 16 | CGGCGGCC G CGGCGGCG | 3 | CGCCGCCG GGCTAGCTACAACGA GGCCGCCG | 2331 |
| 19 | CGGCCGCG G CGGCGGAG | 4 | CTCCGCCG GGCTAGCTACAACGA CGCGGCCG | 2332 |
| 22 | CCGCGGCG G CGGAGGCA | 5 | TGCCTCCG GGCTAGCTACAACGA CGCCGCGG | 2333 |
| 28 | CGGCGGAG G CAGCAGCG | 6 | CGCTGCTG GGCTAGCTACAACGA CTCCGCCG | 2334 |
| 31 | CGGAGGCA G CAGCGGCG | 7 | CGCCGCTG GGCTAGCTACAACGA TGCCTCCG | 2335 |
| 34 | AGGCAGCA G CGGCGGCG | 8 | CGCCGCCG GGCTAGCTACAACGA TGCTGCCT | 2336 |
| 37 | CAGCAGCG G CGGCGGCA | 9 | TGCCGCCG GGCTAGCTACAACGA CGCTGCTG | 2337 |
| 40 | CAGCGGCG G CGGCAGUG | 10 | CACTGCCG GGCTAGCTACAACGA CGCCGCTG | 2338 |
| 43 | CGGCGGCG G CAGUGGCG | 11 | CGCCACTG GGCTAGCTACAACGA CGCCGCCG | 2339 |
| 46 | CGGCGGCA G UGGCGGCG | 12 | CGCCGCCA GGCTAGCTACAACGA TGCCGCCG | 2340 |
| 49 | CGGCAGUG G CGGCGGCG | 13 | CGCCGCCG GGCTAGCTACAACGA CACTGCCG | 2341 |
| 52 | CAGUGGCG G CGGCGAAG | 14 | CTTCGCCG GGCTAGCTACAACGA CGCCACTG | 2342 |
| 55 | UGGCGGCG G CGAAGGUG | 15 | CACCTTCG GGCTAGCTACAACGA CGCCGCCA | 2343 |
| 61 | CGGCGAAG G UGGCGGCG | 16 | CGCCGCCA GGCTAGCTACAACGA CTTCGCCG | 2344 |
| 64 | CGAAGGUG G CGGCGGCU | 17 | AGCCGCCG GGCTAGCTACAACGA CACCTTCG | 2345 |
| 67 | AGGUGGCG G CGGCUCGG | 18 | CCGAGCCG GGCTAGCTACAACGA CGCCACCT | 2346 |
| 70 | UGGCGGCG G CUCGGCCA | 19 | TGGCCGAG GGCTAGCTACAACGA CGCCGCCA | 2347 |
| 75 | GCGGCUCG G CCAGUACU | 20 | AGTACTGG GGCTAGCTACAACGA CGAGCCGC | 2348 |
| 79 | CUCGGCCA G UACUCCCG | 21 | CGGGAGTA GGCTAGCTACAACGA TGGCCGAG | 2349 |
| 81 | CGGCCAGU A CUCCCGGC | 22 | GCCGGGAG GGCTAGCTACAACGA ACTGGCCG | 2350 |
| 88 | UACUCCCG G CCCCCGCC | 23 | GGCGGGGG GGCTAGCTACAACGA CGGGAGTA | 2351 |
| 94 | CGGCCCCC G CCAUUUCG | 24 | CGAAATGG GGCTAGCTACAACGA GGGGGCCG | 2352 |
| 97 | CCCCCGCC A UUUCGGAC | 25 | GTCCGAAA GGCTAGCTACAACGA GGCGGGGG | 2353 |
| 104 | CAUUUCGG A CUGGGAGC | 26 | GCTCCCAG GGCTAGCTACAACGA CCGAAATG | 2354 |
| 111 | GACUGGGA G CGAGCGCG | 27 | CGCGCTCG GGCTAGCTACAACGA TCCCAGTC | 2355 |
| 115 | GGGAGCGA G CGCGGCGC | 28 | GCGCCGCG GGCTAGCTACAACGA TCGCTCCC | 2356 |
| 117 | GAGCGAGC G CGGCGCAG | 29 | CTGCGCCG GGCTAGCTACAACGA GCTCGCTC | 2357 |
| 120 | CGAGCGCG G CGCACGCA | 30 | TGCCTGCG GGCTAGCTACAACGA CGCGCTCC | 2358 |
| 122 | AGCGCGGC G CAGGCACU | 31 | AGTGCCTG GCCTAGCTACAACGA GCCGCGCT | 2359 |
| 126 | CGGCGCAG G CACUGAAG | 32 | CTTCAGTG GGCTAGCTACAACGA CTGCGCCG | 2360 |
| 128 | GCGCAGGC A CUGAAGGC | 33 | GCCTTCAG GGCTAGCTACAACGA GCCTGCGC | 2361 |
| 135 | CACUGAAG G CGGCGGCG | 34 | CGCCGCCG GGCTAGCTACAACGA CTTCAGTG | 2362 |
| 138 | UGAAGGCG G CGGCGGGG | 35 | CCCCGCCG GGCTAGCTACAACGA CGCCTTCA | 2363 |
| 141 | AGGCGGCG G CGGGGCCA | 36 | TGGCCCCG GGCTAGCTACAACGA CGCCGCCT | 2364 |
| 146 | GCGGCGGG G CCAGAGGC | 37 | GCCTCTGG GGCTAGCTACAACGA CCCGCCGC | 2365 |
| 153 | GGCCAGAG G CUCAGCGG | 38 | CCGCTGAG GGCTAGCTACAACGA CTCGCGCC | 2366 |
| 158 | GAGGCUCA G CGGCUCCC | 39 | GGGAGCCG GGCTAGCTACAACGA TGAGCCTC | 2367 |
| 161 | GCUCAGCG G CUCCCAGG | 40 | CCTGGGAG GGCTAGCTACAACGA CGCTGAGC | 2368 |
| 169 | GCUCCCAG G UGCGGGAG | 41 | CTCCCGCA GGCTAGCTACAACGA CTGGGAGC | 2369 |
| 171 | UCCCAGGU G CGGGAGAG | 42 | CTCTCCCG GGCTAGCTACAACGA ACCTGGGA | 2370 |
| 182 | GGAGAGAG G CCUGCUGA | 43 | TCAGCAGG GGCTAGCTACAACGA CTCTCTCC | 2371 |
| 186 | AGAGGCCU G CUGAAAAU | 44 | ATTTTCAG GGCTAGCTACAACGA AGGCCTCT | 2372 |
| 193 | UGCUGAAA A UGACUGAA | 45 | TTCAGTCA GGCTAGCTACAACGA TTTCAGCA | 2373 |
| 196 | UGAAAAUG A CUGAAUAU | 46 | ATATTCAG GGCTAGCTACAACGA CATTTTCA | 2374 |
| 201 | AUGACUGA A UAUAAACU | 47 | AGTTTATA GGCTAGCTACAACGA TCAGTCAT | 2375 |
| 203 | GACUGAAU A UAAACUUG | 48 | CAAGTTTA GGCTAGCTACAACGA ATTCAGTC | 2376 |
| 207 | GAAUAUAA A CUUGUGGU | 49 | ACCACAAG GGCTAGCTACAACGA TTATATTC | 2377 |
| 211 | AUAAACUU G UGGUAGUU | 50 | AACTACCA GGCTAGCTACAACGA AAGTTTAT | 2378 |
| 214 | AACUUGUG G UAGUUGGA | 51 | TCCAACTA GGCTAGCTACAACGA CACAAGTT | 2379 |
| 217 | UUGUGGUA G UUGGAGCU | 52 | AGCTCCAA GGCTAGCTACAACGA TACCACAA | 2380 |
| 223 | UAGUUGGA G CUUGUGGC | 53 | GCCACAAG GGCTAGCTACAACGA TCCAACTA | 2381 |
| 227 | UGGAGCUU G UGGCGUAG | 54 | CTACGCCA GGCTAGCTACAACGA AAGCTCCA | 2382 |
| 230 | AGCUUGUG G CGUAGGCA | 55 | TGCCTACG GGCTAGCTACAACGA CACAAGCT | 2383 |
| 232 | CUUGUGGC G UAGGCAAG | 56 | CTTGCCTA GGCTAGCTACAACGA GCCACAAG | 2384 |
| 236 | UGGCGUAG G CAAGAGUG | 57 | CACTCTTG GGCTAGCTACAACGA CTACGCCA | 2385 |
| 242 | AGGCAAGA G UGCCUUGA | 58 | TCAAGGCA GGCTAGCTACAACGA TCTTGCCT | 2386 |
| 244 | GCAAGAGU G CCUUGACG | 59 | CGTCAAGG GGCTAGCTACAACGA ACTCTTGC | 2387 |
| 250 | GUGCCUUG A CGAUACAG | 60 | CTGTATCG GGCTAGCTACAACGA CAAGGCAC | 2388 |
| 253 | CCUUGACG A UACAGCUA | 61 | TAGCTGTA GGCTAGCTACAACGA CGTCAAGG | 2389 |
| 255 | UUGACGAU A CAGCUAAU | 62 | ATTAGCTG GGCTAGCTACAACGA ATCGTCAA | 2390 |
| 258 | ACGAUACA G CUAAUUCA | 63 | TGAATTAG GGCTAGCTACAACGA TGTATCGT | 2391 |
| 262 | UACAGCUA A UUCAGAAU | 64 | ATTCTGAA GGCTAGCTACAACGA TAGCTGTA | 2392 |
| 269 | AAUUCAGA A UCAUUUUG | 65 | CAAAATGA GGCTAGCTACAACGA TCTGAATT | 2393 |
| 272 | UCAGAAUC A UUUUGUGG | 66 | CCACAAAA GGCTAGCTACAACGA GATTCTGA | 2394 |
| 277 | AUCAUUUU G UGGACGAA | 67 | TTCGTCCA GGCTAGCTACAACGA AAAATGAT | 2395 |
| 281 | UUUUGUGG A CGAAUAUG | 68 | CATATTCG GGCTAGCTACAACGA CCACAAAA | 2396 |
| 285 | GUGGACGA A UAUGAUCC | 69 | GGATCATA GGCTAGCTACAACGA TCGTCCAC | 2397 |
| 287 | GGACGAAU A UGAUCCAA | 70 | TTGGATCA GGCTAGCTACAACGA ATTCGTCC | 2398 |
| 290 | CGAAUAUG A UCCAUCAA | 71 | TTGTTGGA GGCTAGCTACAACGA CATATTCG | 2399 |
| 295 | AUGAUCCA A CAAUAGAG | 72 | CTCTATTG GGCTAGCTACAACGA TGGATCAT | 2400 |
| 298 | AUCCAACA A UAGAGGAU | 73 | ATCCTCTA GGCTAGCTACAACGA TGTTGGAT | 2401 |
| 305 | AAUAGAGG A UUCCUACA | 74 | TGTAGGAA GGCTAGCTACAACGA CCTCTATT | 2402 |
| 311 | GGAUUCCU A CAGGAAGC | 75 | GCTTCCTG GGCTAGCTACAACGA AGGAATCC | 2403 |
| 318 | UACAGGAA G CAAGUAGU | 76 | ACTACTTG GGCTAGCTACAACGA TTCCTGTA | 2404 |
| 322 | GGAAGCAA G UAGUAAUU | 77 | AATTACTA GGCTAGCTACAACGA TTGCTTCC | 2405 |
| 325 | AGCAAGUA G UAAUUGAU | 78 | ATCAATTA GGCTAGCTACAACGA TACTTGCT | 2406 |
| 328 | AAGUAGUA A UUGAUGGA | 79 | TCCATCAA GGCTAGCTACAACGA TACTACTT | 2407 |
| 332 | AGUAAUUG A UGGAGAAA | 80 | TTTCTCCA GGCTAGCTACAACGA CAATTACT | 2408 |
| 340 | AUGGAGAA A CCUGUCUC | 81 | GAGACAGG GGCTAGCTACAACGA TTCTCCAT | 2409 |
| 344 | AGAAACCU G UCUCUUGG | 82 | CCAAGAGA GGCTAGCTACAACGA AGGTTTCT | 2410 |
| 353 | UCUCUUGG A UAUUCUCG | 83 | CGAGAATA GGCTAGCTACAACGA CCAAGAGA | 2411 |
| 355 | UCUUGGAU A UUCUCGAC | 84 | GTCGAGAA GGCTAGCTACAACGA ATCCAAGA | 2412 |
| 362 | UAUUCUCG A CACAGCAG | 85 | CTGCTGTG GGCTAGCTACAACGA CGAGAATA | 2413 |
| 364 | UUCUCGAC A CAGCAGGU | 86 | ACCTGCTG GGCTAGCTACAACGA GTCGAGAA | 2414 |
| 367 | UCGACACA G CAGGUCAA | 87 | TTGACCTG GGCTAGCTACAACGA TGTGTCGA | 2415 |
| 371 | CACAGCAG G UCAAGAGG | 88 | CCTCTTGA GGCTAGCTACAACGA CTGCTGTG | 2416 |
| 381 | CAAGAGGA G UACAGUGC | 89 | GCACTGTA GGCTAGCTACAACGA TCCTCTTG | 2417 |
| 383 | AGAGGAGU A CAGUGCAA | 90 | TTGCACTG GGCTAGCTACAACGA ACTCCTCT | 2418 |
| 386 | GGAGUACA G UGCAAUGA | 91 | TCATTGCA GGCTAGCTACAACGA TGTACTCC | 2419 |
| 388 | AGUACAGU G CAAUGAGG | 92 | CCTCATTG GGCTAGCTACAACGA ACTGTACT | 2420 |
| 391 | ACAGUGCA A UGAGGGAC | 93 | GTCCCTCA GGCTAGCTACAACGA TGCACTGT | 2421 |
| 398 | AAUGAGGG A CCAGUACA | 94 | TGTACTGG GGCTAGCTACAACGA CCCTCATT | 2422 |
| 402 | AGGGACCA G UACAUGAG | 95 | CTCATGTA GGCTAGCTACAACGA TGGTCCCT | 2423 |
| 404 | GGACCAGU A CAUGAGGA | 96 | TCCTCATG GGCTAGCTACAACGA ACTGGTCC | 2424 |
| 406 | ACCAGUAC A UGAGGACU | 97 | AGTCCTCA GGCTAGCTACAACGA GTACTGGT | 2425 |
| 412 | ACAUGAGG A CUGGGGAG | 98 | CTCCCCAG GGCTAGCTACAACGA CCTCATGT | 2426 |
| 422 | UGGGGAGG G CUUUCUUU | 99 | AAAGAAAG GGCTAGCTACAACGA CCTCCCCA | 2427 |
| 431 | CUUUCUUU G UGUAUUUG | 100 | CAAATACA GGCTAGCTACAACGA AAAGAAAG | 2428 |
| 433 | UUCUUUGU G UAUUUGCC | 101 | GGCAAATA GGCTAGCTACAACGA ACAAAGAA | 2429 |
| 435 | CUUUGUGU A UUUGCCAU | 102 | ATGGCAAA GGCTAGCTACAACGA ACACAAAG | 2430 |
| 439 | GUGUAUUU G CCAUAAAU | 103 | ATTTATGG GGCTAGCTACAACGA AAATACAC | 2431 |
| 442 | UAUUUGCC A UAAAUAAU | 104 | ATTATTTA GGCTAGCTACAACGA GGCAAATA | 2432 |
| 446 | UGCCAUAA A UAAUACUA | 105 | TAGTATTA GGCTAGCTACAACGA TTATGGCA | 2433 |
| 449 | CAUAAAUA A UACUAAAU | 106 | ATTTAGTA GGCTAGCTACAACGA TATTTATG | 2434 |
| 451 | UAAAUAAU A CUAAAUCA | 107 | TGATTTAG GGCTAGCTACAACGA ATTATTTA | 2435 |
| 456 | AAUACUAA A UCAUUUGA | 108 | TCAAATGA GGCTAGCTACAACGA TTAGTATT | 2436 |
| 459 | ACUAAAUC A UUUGAAGA | 109 | TCTTCAAA GGCTAGCTACAACGA GATTTAGT | 2437 |
| 467 | AUUUGAAG A UAUUCACC | 110 | GGTGAATA GGCTAGCTACAACGA CTTCAAAT | 2438 |
| 469 | UUGAAGAU A UUCACCAU | 111 | ATGGTGAA GGCTAGCTACAACGA ATCTTCAA | 2439 |
| 473 | AGAUAUUC A CCAUUAUA | 112 | TATAATGG GGCTAGCTACAACGA GAATATCT | 2440 |
| 476 | UAUUCACC A UUAUAGAG | 113 | CTCTATAA GGCTAGCTACAACGA GGTGAATA | 2441 |
| 479 | UCACCAUU A UAGAGAAC | 114 | GTTCTCTA GGCTAGCTACAACGA AATGGTGA | 2442 |
| 486 | UAUAGAGA A CAAAUUAA | 115 | TTAATTTG GGCTAGCTACAACGA TCTCTATA | 2443 |
| 490 | GAGAACAA A UUAAAAGA | 116 | TCTTTTAA GGCTAGCTACAACGA TTGTTCTC | 2444 |
| 499 | UUAAAAGA G UUAAGGAC | 117 | GTCCTTAA GGCTAGCTACAACGA TCTTTTAA | 2445 |
| 506 | AGUUAAGG A CUCUGAAG | 118 | CTTCAGAG GGCTAGCTACAACGA CCTTAACT | 2446 |
| 515 | CUCUGAAG A UGUACCUA | 119 | TAGGTACA GGCTAGCTACAACGA CTTCAGAG | 2447 |
| 517 | CUGAAGAU G UACCUAUG | 120 | CATAGGTA GGCTAGCTACAACGA ATCTTCAG | 2448 |
| 519 | GAAGAUGU A CCUAUGGU | 121 | ACCATAGG GGCTAGCTACAACGA ACATCTTC | 2449 |
| 523 | AUGUACCU A UGGUCCUA | 122 | TAGGACCA GGCTAGCTACAACGA AGGTACAT | 2450 |
| 526 | UACCUAUG G UCCUAGUA | 123 | TACTAGGA GGCTAGCTACAACGA CATAGGTA | 2451 |
| 532 | UGGUCCUA G UAGGAAAU | 124 | ATTTCCTA GGCTAGCTACAACGA TAGGACCA | 2452 |
| 539 | AGUAGGAA A UAAAUGUG | 125 | CACATTTA GGCTAGCTACAACGA TTCCTACT | 2453 |
| 543 | GGAAAUAA A UGUGAUUU | 126 | AAATCACA GGCTAGCTACAACGA TTATTTCC | 2454 |
| 545 | AAAUAAAU G UGAUUUGC | 127 | GCAAATCA GGCTAGCTACAACGA ATTTATTT | 2455 |
| 548 | UAAAUGUG A UUUGCCUU | 128 | AAGGCAAA GGCTAGCTACAACGA CACATTTA | 2456 |
| 552 | UGUGAUUU G CCUUCUAG | 129 | CTAGAAGG GGCTAGCTACAACGA AAATCACA | 2457 |
| 562 | CUUCUAGA A CAGUAGAC | 130 | GTCTACTG GGCTAGCTACAACGA TCTAGAAG | 2458 |
| 565 | CUAGAACA G UAGACACA | 131 | TGTGTCTA GGCTAGCTACAACGA TGTTCTAG | 2459 |
| 569 | AACAGUAG A CACAAAAC | 132 | GTTTTGTG GGCTAGCTACAACGA CTACTGTT | 2460 |
| 571 | CAGUAGAC A CAAAACAG | 133 | CTGTTTTG GGCTAGCTACAACGA GTCTACTG | 2461 |
| 576 | GACACAAA A CAGGCUCA | 134 | TGAGCCTG GGCTAGCTACAACGA TTTGTGTC | 2462 |
| 580 | CAAAACAG G CUCAGGAC | 135 | GTCCTGAG GGCTAGCTACAACGA CTGTTTTG | 2463 |
| 587 | GGCUCAGG A CUUAGCAA | 136 | TTGCTAAG GGCTAGCTACAACGA CCTGAGCC | 2464 |
| 592 | AGGACUUA G CAAGAAGU | 137 | ACTTCTTG GGCTAGCTACAACGA TAAGTCCT | 2465 |
| 599 | AGCAAGAA G UUAUGGAA | 138 | TTCCATAA GGCTAGCTACAACGA TTCTTGCT | 2466 |
| 602 | AAGAAGUU A UGGAAUUC | 139 | GAATTCCA GGCTAGCTACAACGA AACTTCTT | 2467 |
| 607 | GUUAUGGA A UUCCUUUU | 140 | AAAAGGAA GGCTAGCTACAACGA TCCATAAC | 2468 |
| 616 | UUCCUUUU A UUGAAACA | 141 | TGTTTCAA GGCTAGCTACAACGA AAAAGGAA | 2469 |
| 622 | UUAUUGAA A CAUCAGCA | 142 | TGCTGATG GGCTAGCTACAACGA TTCAATAA | 2470 |
| 624 | AUUGAAAC A UCAGCAAA | 143 | TTTGCTGA GGCTAGCTACAACGA GTTTCAAT | 2471 |
| 628 | AAACAUCA G CAAAGACA | 144 | TGTCTTTG GGCTAGCTACAACGA TGATGTTT | 2472 |
| 634 | CAGCAAAG A CAAGACAG | 145 | CTGTCTTG GGCTAGCTACAACGA CTTTGCTG | 2473 |
| 639 | AAGACAAG A CAGGGUGU | 146 | ACACCCTG GGCTAGCTACAACGA CTTGTCTT | 2474 |
| 644 | AAGACAGG G UGUUGAUG | 147 | CATCAACA GGCTAGCTACAACGA CCTGTCTT | 2475 |
| 646 | GACAGGGU G UUGAUGAU | 148 | ATCATCAA GGCTAGCTACAACGA ACCCTGTC | 2476 |
| 650 | GGGUGUUG A UGAUGCCU | 149 | AGGCATCA GGCTAGCTACAACGA CAACACCC | 2477 |
| 653 | UGUUGAUG A UGCCUUCU | 150 | AGAAGGCA GGCTAGCTACAACGA CATCAACA | 2478 |
| 655 | UUGAUGAU G CCUUCUAU | 151 | ATAGAAGG GGCTAGCTACAACGA ATCATCAA | 2479 |
| 662 | UGCCUUCU A UACAUUAG | 152 | CTAATGTA GGCTAGCTACAACGA AGAAGGCA | 2480 |
| 664 | CCUUCUAU A CAUUAGUU | 153 | AACTAATG GGCTAGCTACAACGA ATAGAAGG | 2481 |
| 666 | UUCUAUAC A UUAGUUCG | 154 | CGAACTAA GGCTAGCTACAACGA GTATAGAA | 2482 |
| 670 | AUACAUUA G UUCGAGAA | 155 | TTCTCGAA GGCTAGCTACAACGA TAATGTAT | 2483 |
| 679 | UUCGAGAA A UUCGAAAA | 156 | TTTTCGAA GGCTAGCTACAACGA TTCTCGAA | 2484 |
| 687 | AUUCGAAA A CAUAAAGA | 157 | TCTTTATG GGCTAGCTACAACGA TTTCGAAT | 2485 |
| 689 | UCGAAAAC A UAAAGAAA | 158 | TTTCTTTA GGCTAGCTACAACGA GTTTTCGA | 2486 |
| 700 | AAGAAAAG A UGAGCAAA | 159 | TTTGCTCA GGCTAGCTACAACGA CTTTTCTT | 2487 |
| 704 | AAAGAUGA G CAAAGAUG | 160 | CATCTTTG GGCTAGCTACAACGA TCATCTTT | 2488 |
| 710 | GAGCAAAG A UGGUAAAA | 161 | TTTTACCA GGCTAGCTACAACGA CTTTGCTC | 2489 |
| 713 | CAAAGAUG G UAAAAAGA | 162 | TCTTTTTA GGCTAGCTACAACGA CATCTTTG | 2490 |
| 732 | AAAAAGAA G UCAAAGAC | 163 | GTCTTTGA GGCTAGCTACAACGA TTCTTTTT | 2491 |
| 739 | AGUCAAAG A CAAAGUGU | 164 | ACACTTTG GGCTAGCTACAACGA CTTTGACT | 2492 |
| 744 | AAGACAAA G UGUGUAAU | 165 | ATTACACA GGCTAGCTACAACGA TTTGTCTT | 2493 |
| 746 | GACAAAGU G UGUAAUUA | 166 | TAATTACA GGCTAGCTACAACGA ACTTTGTC | 2494 |
| 748 | CAAAGUGU G UAAUUAUG | 167 | CATAATTA GGCTAGCTACAACGA ACACTTTG | 2495 |
| 751 | AGUGUGUA A UUAUGUAA | 168 | TTACATAA GGCTAGCTACAACGA TACACACT | 2496 |
| 754 | GUGUAAUU A UGUAAAUA | 169 | TATTTACA GGCTAGCTACAACGA AATTACAC | 2497 |
| 756 | GUAAUUAU G UAAAUACA | 170 | TGTATTTA GGCTAGCTACAACGA ATAATTAC | 2498 |
| 760 | UUAUGUAA A UACAAUUU | 171 | AAATTGTA GGCTAGCTACAACGA TTACATAA | 2499 |
| 762 | AUGUAAAU A CAAUUUGU | 172 | ACAAATTG GGCTAGCTACAACGA ATTTACAT | 2500 |
| 765 | UAAAUACA A UUUGUACU | 173 | AGTACAAA GGCTAGCTACAACGA TGTATTTA | 2501 |
| 769 | UACAAUUU G UACUUUUU | 174 | AAAAAGTA GGCTAGCTACAACGA AAATTGTA | 2502 |
| 771 | CAAUUUGU A CUUUUUUC | 175 | GAAAAAAG GGCTAGCTACAACGA ACAAATTG | 2503 |
| 785 | UUCUUAAG G CAUACUAG | 176 | CTAGTATG GGCTAGCTACAACGA CTTAAGAA | 2504 |
| 787 | CUUAAGGC A UACUAGUA | 177 | TACTAGTA GGCTAGCTACAACGA GCCTTAAG | 2505 |
| 789 | UAAGGCAU A CUAGUACA | 178 | TGTACTAG GGCTAGCTACAACGA ATGCCTTA | 2506 |
| 793 | GCAUACUA G UACAAGUG | 179 | CACTTGTA GGCTAGCTACAACGA TAGTATGC | 2507 |
| 795 | AUACUAGU A CAAGUGGU | 180 | ACCACTTG GGCTAGCTACAACGA ACTAGTAT | 2508 |
| 799 | UAGUACAA G UGGUAAUU | 181 | AATTACCA GGCTAGCTACAACGA TTGTACTA | 2509 |
| 802 | UACAAGUG G UAAUUUUU | 182 | AAAAATTA GGCTAGCTACAACGA CACTTGTA | 2510 |
| 805 | AAGUGGUA A UUUUUGUA | 183 | TACAAAAA GGCTAGCTACAACGA TACCACTT | 2511 |
| 811 | UAAUUUUU G UACAUUAC | 184 | GTAATGTA GGCTAGCTACAACGA AAAAATTA | 2512 |
| 813 | AUUUUUGU A CAUUACAC | 185 | GTGTAATG GGCTAGCTACAACGA ACAAAAAT | 2513 |
| 815 | UUUUGUAC A UUACACUA | 186 | TAGTGTAA GGCTAGCTACAACGA GTACAAAA | 2514 |
| 818 | UGUACAUU A CACUAAAU | 187 | ATTTAGTG GGCTAGCTACAACGA AATGTACA | 2515 |
| 820 | UACAUUAC A CUAAAUUA | 188 | TAATTTAG GGCTAGCTACAACGA GTAATGTA | 2516 |
| 825 | UACACUAA A UUAUUAGC | 189 | GCTAATAA GGCTAGCTACAACGA TTAGTGTA | 2517 |
| 828 | ACUAAAUU A UUAGCAUU | 190 | AATGCTAA GGCTAGCTACAACGA AATTTAGT | 2518 |
| 832 | AAUUAUUA G CAUUUGUU | 191 | AACAAATG GGCTAGCTACAACGA TAATAATT | 2519 |
| 834 | UUAUUAGC A UUUGUUUU | 192 | AAAACAAA GGCTAGCTACAACGA GCTAATAA | 2520 |
| 838 | UAGCAUUU G UUUUAGCA | 193 | TGCTAAAA GGCTAGCTACAACGA AAATGCTA | 2521 |
| 844 | UUGUUUUA G CAUUACCU | 194 | AGGTAATG GGCTAGCTACAACGA TAAAACAA | 2522 |
| 846 | GUUUUAGC A UUACCUAA | 195 | TTAGGTAA GGCTAGCTACAACGA GCTAAAAC | 2523 |
| 849 | UUAGCAUU A CCUAAUUU | 196 | AAATTAGG GGCTAGCTACAACGA AATGCTAA | 2524 |
| 854 | AUUACCUA A UUUUUUUC | 197 | GAAAAAAA GGCTAGCTACAACGA TAGGTAAT | 2525 |
| 865 | UUUUUCCU G CUCCAUGC | 198 | GCATGGAG GGCTAGCTACAACGA AGGAAAAA | 2526 |
| 870 | CCUGCUCC A UGCAGACU | 199 | AGTCTGCA GGCTAGCTACAACGA GGAGCAGG | 2527 |
| 872 | UGCUCCAU G CAGACUGU | 200 | ACAGTCTG GGCTAGCTACAACGA ATGGAGCA | 2528 |
| 876 | CCAUGCAG A CUGUUAGC | 201 | GCTAACAG GGCTAGCTACAACGA CTGCATGG | 2529 |
| 879 | UGCAGACU G UUAGCUUU | 202 | AAAGCTAA GGCTAGCTACAACGA AGTCTGCA | 2530 |
| 883 | GACUGUUA G CUUUUACC | 203 | GGTAAAAG GGCTAGCTACAACGA TAACAGTC | 2531 |
| 889 | UAGCUUUU A CCUUAAAU | 204 | ATTTAAGG GGCTAGCTACAACGA AAAAGCTA | 2532 |
| 896 | UACCUUAA A UGCUUAUU | 205 | AATAAGCA GGCTAGCTACAACGA TTAAGGTA | 2533 |
| 898 | CCUUAAAU G CUUAUUUU | 206 | AAAATAAG GGCTAGCTACAACGA ATTTAAGG | 2534 |
| 902 | AAAUGCUU A UUUUAAAA | 207 | TTTTAAAA GGCTAGCTACAACGA AAGCATTT | 2535 |
| 910 | AUUUUAAA A UGACAGUG | 208 | CACTGTCA GGCTAGCTACAACGA TTTAAAAT | 2536 |
| 913 | UUAAAAUG A CAGUGGAA | 209 | TTCCACTG GGCTAGCTACAACGA CATTTTAA | 2537 |
| 916 | AAAUGACA G UGGAAGUU | 210 | AACTTCCA GGCTAGCTACAACGA TGTCATTT | 2538 |
| 922 | CAGUGGAA G UUUUUUUU | 211 | AAAAAAAA GGCTAGCTACAACGA TTCCACTG | 2539 |
| 939 | UCCUCGAA G UGCCAGUA | 212 | TACTGGCA GGCTAGCTACAACGA TTCGAGGA | 2540 |
| 941 | CUCGAAGU G CCAGUAUU | 213 | AATACTGG GGCTAGCTACAACGA ACTTCGAG | 2541 |
| 945 | AAGUGCCA G UAUUCCCA | 214 | TGGGAATA GGCTAGCTACAACGA TGGCACTT | 2542 |
| 947 | GUGCCAGU A UUCCCAGA | 215 | TCTGGGAA GGCTAGCTACAACGA ACTGGCAC | 2543 |
| 956 | UUCCCAGA G UUUUGGUU | 216 | AACCAAAA GGCTAGCTACAACGA TCTGGGAA | 2544 |
| 962 | GAGUUUUG G UUUUUGAA | 217 | TTCAAAAA GGCTAGCTACAACGA CAAAACTC | 2545 |
| 970 | GUUUUUGA A CUAGCAAU | 218 | ATTGCTAG GGCTAGCTACAACGA TCAAAAAC | 2546 |
| 974 | UUGAACUA G CAAUGCCU | 219 | AGGCATTG GGCTAGCTACAACGA TAGTTCAA | 2547 |
| 977 | AACUAGCA A UGCCUGUG | 220 | CACAGGCA GGCTAGCTACAACGA TGCTAGTT | 2548 |
| 979 | CUAGCAAU G CCUGUGAA | 221 | TTCACAGG GGCTAGCTACAACGA ATTGCTAG | 2549 |
| 983 | CAAUGCCU G UGAAAAAG | 222 | CTTTTTCA GGCTAGCTACAACGA AGGCATTG | 2550 |
| 994 | AAAAAGAA A CUGAAUAC | 223 | GTATTCAG GGCTAGCTACAACGA TTCTTTTT | 2551 |
| 999 | GAAACUGA A UACCUAAG | 224 | CTTAGGTA GGCTAGCTACAACGA TCAGTTTC | 2552 |
| 1001 | AACUGAAU A CCUAAGAU | 225 | ATCTTAGG GGCTAGCTACAACGA ATTCAGTT | 2553 |
| 1008 | UACCUAAG A UUUCUGUC | 226 | GACAGAAA GGCTAGCTACAACGA CTTAGGTA | 2554 |
| 1014 | AGAUUUCU G UCUUGGGG | 227 | CCCCAAGA GGCTAGCTACAACGA AGAAATCT | 2555 |
| 1022 | GUCUUGGG G UUUUUGGU | 228 | ACCAAAAA GGCTAGCTACAACGA CCCAAGAC | 2556 |
| 1029 | GGUUUUUG G UGCAUGCA | 229 | TGCATGCA GGCTAGCTACAACGA CAAAAACC | 2557 |
| 1031 | UUUUUGGU G CAUGCAGU | 230 | ACTGCATG GGCTAGCTACAACGA ACCAAAAA | 2558 |
| 1033 | UUUGGUGC A UGCAGUUG | 231 | CAACTGCA GGCTAGCTACAACGA GCACCAAA | 2559 |
| 1035 | UGGUGCAU G CAGUUGAU | 232 | ATCAACTG GGCTAGCTACAACGA ATGCACCA | 2560 |
| 1038 | UGCAUGCA G UUGAUUAC | 233 | GTAATCAA GGCTAGCTACAACGA TGCATGCA | 2561 |
| 1042 | UGCAGUUG A UUACUUCU | 234 | AGAAGTAA GGCTAGCTACAACGA CAACTGCA | 2562 |
| 1045 | AGUUGAUU A CUUCUUAU | 235 | ATAAGAAG GGCTAGCTACAACGA AATCAACT | 2563 |
| 1052 | UACUUCUU A UUUUUCUU | 236 | AAGAAAAA GGCTAGCTACAACGA AAGAAGTA | 2564 |
| 1061 | UUUUUCUU A CCAAGUGU | 237 | ACACTTGG GGCTAGCTACAACGA AAGAAAAA | 2565 |
| 1066 | CUUACCAA G UGUGAAUG | 238 | CATTCACA GGCTAGCTACAACGA TTGGTAAG | 2566 |
| 1068 | UACCAAGU G UGAAUGUU | 239 | AACATTCA GGCTAGCTACAACGA ACTTGGTA | 2567 |
| 1072 | AAGUGUGA A UGUUGGUG | 240 | CACCAACA GGCTAGCTACAACGA TCACACTT | 2568 |
| 1074 | GUGUGAAU G UUGGUGUG | 241 | CACACCAA GGCTAGCTACAACGA ATTCACAC | 2569 |
| 1078 | GAAUGUUG G UGUGAAAC | 242 | GTTTCACA GGCTAGCTACAACGA CAACATTC | 2570 |
| 1080 | AUGUUGGU G UGAAACAA | 243 | TTGTTTCA GGCTAGCTACAACGA ACCAACAT | 2571 |
| 1085 | GGUGUGAA A CAAAUUAA | 244 | TTAATTTG GGCTAGCTACAACGA TTCACACC | 2572 |
| 1089 | UGAAACAA A UUAAUGAA | 245 | TTCATTAA GGCTAGCTACAACGA TTGTTTCA | 2573 |
| 1093 | ACAAAUUA A UGAAGCUU | 246 | AAGCTTCA GGCTAGCTACAACGA TAATTTGT | 2574 |
| 1098 | UUAAUGAA G CUUUUGAA | 247 | TTCAAAAG GGCTAGCTACAACGA TTCATTAA | 2575 |
| 1106 | GCUUUUGA A UCAUCCCU | 248 | AGGGATGA GGCTAGCTACAACGA TCAAAAGC | 2576 |
| 1109 | UUUGAAUC A UCCCUAUU | 249 | AATAGGGA GGCTAGCTACAACGA GATTCAAA | 2577 |
| 1115 | UCAUCCCU A UUCUGUGU | 250 | ACACAGAA GGCTAGCTACAACGA AGGGATGA | 2578 |
| 1120 | CCUAUUCU G UGUUUUAU | 251 | ATAAAACA GGCTAGCTACAACGA AGAATAGG | 2579 |
| 1122 | UAUUCUGU G UUUUAUCU | 252 | AGATAAAA GGCTAGCTACAACGA ACAGAATA | 2580 |
| 1127 | UGUGUUUU A UCUAGUCA | 253 | TGACTAGA GGCTAGCTACAACGA AAAACACA | 2581 |
| 1132 | UUUAUCUA G UCACAUAA | 254 | TTATGTGA GGCTAGCTACAACGA TAGATAAA | 2582 |
| 1135 | AUCUAGUC A CAUAAAUG | 255 | CATTTATG GGCTAGCTACAACGA GACTAGAT | 2583 |
| 1137 | CUAGUCAC A UAAAUGGA | 256 | TCCATTTA GGCTAGCTACAACGA GTGACTAG | 2584 |
| 1141 | UCACAUAA A UGGAUUAA | 257 | TTAATCCA GGCTAGCTACAACGA TTATGTGA | 2585 |
| 1145 | AUAAAUGG A UUAAUUAC | 258 | GTAATTAA GGCTAGCTACAACGA CCATTTAT | 2586 |
| 1149 | AUGGAUUA A UUACUAAU | 259 | ATTAGTAA GGCTAGCTACAACGA TAATCCAT | 2587 |
| 1152 | GAUUAAUU A CUAAUUUC | 260 | GAAATTAG GGCTAGCTACAACGA AATTAATC | 2588 |
| 1156 | AAUUACUA A UUUCAGUU | 261 | AACTGAAA GGCTAGCTACAACGA TAGTAATT | 2589 |
| 1162 | UAAUUUCA G UUGAGACC | 262 | GGTCTCAA GGCTAGCTACAACGA TGAAATTA | 2590 |
| 1168 | CAGUUGAG A CCUUCUAA | 263 | TTAGAAGG GGCTAGCTACAACGA CTCAACTG | 2591 |
| 1176 | ACCUUCUA A UUGGUUUU | 264 | AAAACCAA GGCTAGCTACAACGA TAGAAGGT | 2592 |
| 1180 | UCUAAUUG G UUUUUACU | 265 | AGTAAAAA GGCTAGCTACAACGA CAATTAGA | 2593 |
| 1186 | UGGUUUUU A CUGAAACA | 266 | TGTTTCAG GGCTAGCTACAACGA AAAAACCA | 2594 |
| 1192 | UUACUGAA A CAUUGAGG | 267 | CCTCAATG GGCTAGCTACAACGA TTCAGTAA | 2595 |
| 1194 | ACUGAAAC A UUGAGGGA | 268 | TCCCTCAA GGCTAGCTACAACGA GTTTCAGT | 2596 |
| 1202 | AUUGAGGG A CACAAAUU | 269 | AATTTGTG GGCTAGCTACAACGA CCCTCAAT | 2597 |
| 1204 | UGAGGGAC A CAAAUUUA | 270 | TAAATTTG GGCTAGCTACAACGA GTCCCTCA | 2598 |
| 1208 | GGACACAA A UUUAUGGG | 271 | CCCATAAA GGCTAGCTACAACGA TTGTGTCC | 2599 |
| 1212 | ACAAAUUU A UGGGCUUC | 272 | GAAGCCCA GGCTAGCTACAACGA AAATTTGT | 2600 |
| 1216 | AUUUAUGG G CUUCCUGA | 273 | TCAGGAAG GGCTAGCTACAACGA CCATAAAT | 2601 |
| 1224 | GCUUCCUG A UGAUGAUU | 274 | AATCATCA GGCTAGCTACAACGA CAGGAAGC | 2602 |
| 1227 | UCCUGAUG A UGAUUCUU | 275 | AAGAATCA GGCTAGCTACAACGA CATCAGGA | 2603 |
| 1230 | UGAUGAUG A UUCUUCUA | 276 | TAGAAGAA GGCTAGCTACAACGA CATCATCA | 2604 |
| 1240 | UCUUCUAG G CAUCAUGU | 277 | ACATGATG GGCTAGCTACAACGA CTAGAAGA | 2605 |
| 1242 | UUCUAGGC A UCAUGUCC | 278 | GGACATGA GGCTAGCTACAACGA GCCTAGAA | 2606 |
| 1245 | UAGGCAUC A UGUCCUAU | 279 | ATAGGACA GGCTAGCTACAACGA GATGCCTA | 2607 |
| 1247 | GGCAUCAU G UCCUAUAG | 280 | CTATAGGA GGCTAGCTACAACGA ATGATGCC | 2608 |
| 1252 | CAUGUCCU A UAGUUUGU | 281 | ACAAACTA GGCTAGCTACAACGA AGGACATG | 2609 |
| 1255 | GUCCUAUA G UUUGUCAU | 282 | ATGACAAA GGCTAGCTACAACGA TATAGGAC | 2610 |
| 1259 | UAUAGUUU G UCAUCCCU | 283 | AGGGATGA GGCTAGCTACAACGA AAACTATA | 2611 |
| 1262 | AGUUUGUC A UCCCUGAU | 284 | ATCAGGGA GGCTAGCTACAACGA GACAAACT | 2612 |
| 1269 | CAUCCCUG A UGAAUGUA | 285 | TACATTCA GGCTAGCTACAACGA CAGGGATG | 2613 |
| 1273 | CCUGAUGA A UGUAAAGU | 286 | ACTTTACA GGCTAGCTACAACGA TCATCAGG | 2614 |
| 1275 | UGAUGAAU G UAAAGUUA | 287 | TAACTTTA GGCTAGCTACAACGA ATTCATCA | 2615 |
| 1280 | AAUGUAAA G UUACACUG | 288 | CAGTGTAA GGCTAGCTACAACGA TTTACATT | 2616 |
| 1283 | GUAAAGUU A CACUGUUC | 289 | GAACAGTG GGCTAGCTACAACGA AACTTTAC | 2617 |
| 1285 | AAAGUUAC A CUGUUCAC | 290 | GTGAACAG GGCTAGCTACAACGA GTAACTTT | 2618 |
| 1288 | GUUACACU G UUCACAAA | 291 | TTTGTGAA GGCTAGCTACAACGA AGTGTAAC | 2619 |
| 1292 | CACUGUUC A CAAAGGUU | 292 | AACCTTTG GGCTAGCTACAACGA GAACAGTG | 2620 |
| 1298 | UCACAAAG G UUUUGUCU | 293 | AGACAAAA GGCTAGCTACAACGA CTTTGTGA | 2621 |
| 1303 | AAGGUUUU G UCUCCUUU | 294 | AAAGGAGA GGCTAGCTACAACGA AAAACCTT | 2622 |
| 1314 | UCCUUUCC A CUGCUAUU | 295 | AATAGCAG GGCTAGCTACAACGA GGAAAGGA | 2623 |
| 1317 | UUUCCACU G CUAUUAGU | 296 | ACTAATAG GGCTAGCTACAACGA AGTGGAAA | 2624 |
| 1320 | CCACUGCU A UUAGUCAU | 297 | ATGACTAA GGCTAGCTACAACGA AGCAGTGG | 2625 |
| 1324 | UGCUAUUA G UCAUGGUC | 298 | GACCATGA GGCTAGCTACAACGA TAATAGCA | 2626 |
| 1327 | UAUUAGUC A UGGUCACU | 299 | AGTGACCA GGCTAGCTACAACGA GACTAATA | 2627 |
| 1330 | UAGUCAUG G UCACUCUC | 300 | GAGAGTGA GGCTAGCTACAACGA CATGACTA | 2628 |
| 1333 | UCAUGGUC A CUCUCCCC | 301 | GGGGAGAG GGCTAGCTACAACGA GACCATGA | 2629 |
| 1345 | UCCCCAAA A UAUUAUAU | 302 | ATATAATA GGCTAGCTACAACGA TTTGGGGA | 2630 |
| 1347 | CCCAAAAU A UUAUAUUU | 303 | AAATATAA GGCTAGCTACAACGA ATTTTGGG | 2631 |
| 1350 | AAAAUAUU A UAUUUUUU | 304 | AAAAAATA GGCTAGCTACAACGA AATATTTT | 2632 |
| 1352 | AAUAUUAU A UUUUUUCU | 305 | AGAAAAAA GGCTAGCTACAACGA ATAATATT | 2633 |
| 1361 | UUUUUUCU A UAAAAAGA | 306 | TCTTTTTA GGCTAGCTACAACGA AGAAAAAA | 2634 |
| 1375 | AGAAAAAA A UGGAAAAA | 307 | TTTTTCCA GGCTAGCTACAACGA TTTTTTCT | 2635 |
| 1385 | GGAAAAAA A UUACAAGG | 308 | CCTTGTAA GGCTAGCTACAACGA TTTTTTCC | 2636 |
| 1388 | AAAAAAUU A CAAGGCAA | 309 | TTGCCTTG GGCTAGCTACAACGA AATTTTTT | 2637 |
| 1393 | AUUACAAG G CAAUGGAA | 310 | TTCCATTG GGCTAGCTACAACGA CTTGTAAT | 2638 |
| 1396 | ACAAGGCA A UGGAAACU | 311 | AGTTTCCA GGCTAGCTACAACGA TGCCTTGT | 2639 |
| 1402 | CAAUGGAA A CUAUUAUA | 312 | TATAATAG GGCTAGCTACAACGA TTCCATTG | 2640 |
| 1405 | UGGAAACU A UUAUAAGG | 313 | CCTTATAA GGCTAGCTACAACGA AGTTTCCA | 2641 |
| 1408 | AAACUAUU A UAAGGCCA | 314 | TGGCCTTA GGCTAGCTACAACGA AATAGTTT | 2642 |
| 1413 | AUUAUAAG G CCAUUUCC | 315 | GGAAATGG GGCTAGCTACAACGA CTTATAAT | 2643 |
| 1416 | AUAAGGCC A UUUCCUUU | 316 | AAAGGAAA GGCTAGCTACAACGA GGCCTTAT | 2644 |
| 1427 | UCCUUUUC A CAUUAGAU | 317 | ATCTAATG GGCTAGCTACAACGA GAAAAGGA | 2645 |
| 1429 | CUUUUCAC A UUAGAUAA | 318 | TTATCTAA GGCTAGCTACAACGA GTGAAAAG | 2646 |
| 1434 | CACAUUAG A UAAAUUAC | 319 | GTAATTTA GGCTAGCTACAACGA CTAATGTG | 2647 |
| 1438 | UUAGAUAA A UUACUAUA | 320 | TATAGTAA GGCTAGCTACAACGA TTATCTAA | 2648 |
| 1441 | GAUAAAUU A CUAUAAAG | 321 | CTTTATAG GGCTAGCTACAACGA AATTTATC | 2649 |
| 1444 | AAAUUACU A UAAAGACU | 322 | AGTCTTTA GGCTAGCTACAACGA AGTAATTT | 2650 |
| 1450 | CUAUAAAG A CUCCUAAU | 323 | ATTAGGAG GGCTAGCTACAACGA CTTTATAG | 2651 |
| 1457 | GACUCCUA A UAGCUUUU | 324 | AAAAGCTA GGCTAGCTACAACGA TAGGAGTC | 2652 |
| 1460 | UCCUAAUA G CUUUUUCC | 325 | GGAAAAAG GGCTAGCTACAACGA TATTAGGA | 2653 |
| 1470 | UUUUUCCU G UUAAGGCA | 326 | TGCCTTAA GGCTAGCTACAACGA AGGAAAAA | 2654 |
| 1476 | CUGUUAAG G CAGACCCA | 327 | TGGGTCTG GGCTAGCTACAACGA CTTAACAG | 2655 |
| 1480 | UAAGGCAG A CCCAGUAU | 328 | ATACTGGG GGCTAGCTACAACGA CTGCCTTA | 2656 |
| 1485 | CAGACCCA G UAUGAAUG | 329 | CATTCATA GGCTAGCTACAACGA TGGGTCTG | 2657 |
| 1487 | GACCCAGU A UGAAUGGG | 330 | CCCATTCA GGCTAGCTACAACGA ACTGGGTC | 2658 |
| 1491 | CAGUAUGA A UGGGAUUA | 331 | TAATCCCA GGCTAGCTACAACGA TCATACTG | 2659 |
| 1496 | UGAAUGGG A UUAUUAUA | 332 | TATAATAA GGCTAGCTACAACGA CCCATTCA | 2660 |
| 1499 | AUGGGAUU A UUAUAGCA | 333 | TGCTATAA GGCTAGCTACAACGA AATCCCAT | 2661 |
| 1502 | GGAUUAUU A UAGCAACC | 334 | GGTTGCTA GGCTAGCTACAACGA AATAATCC | 2662 |
| 1505 | UUAUUAUA G CAACCAUU | 335 | AATGGTTG GGCTAGCTACAACGA TATAATAA | 2663 |
| 1508 | UUAUAGCA A CCAUUUUG | 336 | CAAAATGG GGCTAGCTACAACGA TGCTATAA | 2664 |
| 1511 | UAGCAACC A UUUUGGGG | 337 | CCCCAAAA GGCTAGCTACAACGA GGTTGCTA | 2665 |
| 1519 | AUUUUGGG G CUAUAUUU | 338 | AAATATAG GGCTAGCTACAACGA CCCAAAAT | 2666 |
| 1522 | UUGGGGCU A UAUUUACA | 339 | TGTAAATA GGCTAGCTACAACGA AGCCCCAA | 2667 |
| 1524 | GGGGCUAU A UUUACAUG | 340 | CATGTAAA GGCTAGCTACAACGA ATAGCCCC | 2668 |
| 1528 | CUAUAUUU A CAUGCUAC | 341 | GTAGCATG GGCTAGCTACAACGA AAATATAG | 2669 |
| 1530 | AUAUUUAC A UGCUACUA | 342 | TAGTAGCA GGCTAGCTACAACGA GTAAATAT | 2670 |
| 1532 | AUUUACAU G CUACUAAA | 343 | TTTAGTAG GGCTAGCTACAACGA ATGTAAAT | 2671 |
| 1535 | UACAUGCU A CUAAAUUU | 344 | AAATTTAG GGCTAGCTACAACGA AGCATGTA | 2672 |
| 1540 | GCUACUAA A UUUUUAUA | 345 | TATAAAAA GGCTAGCTACAACGA TTAGTAGC | 2673 |
| 1546 | AAAUUUUU A UAAUAAUU | 346 | AATTATTA GGCTAGCTACAACGA AAAAATTT | 2674 |
| 1549 | UUUUUAUA A UAAUUGAA | 347 | TTCAATTA GGCTAGCTACAACGA TATAAAAA | 2675 |
| 1552 | UUAUAAUA A UUGAAAAG | 348 | CTTTTCAA GGCTAGCTACAACGA TATTATAA | 2676 |
| 1561 | UUGAAAAG A UUUUAACA | 349 | TGTTAAAA GGCTAGCTACAACGA CTTTTCAA | 2677 |
| 1567 | AGAUUUUA A CAAGUAUA | 350 | TATACTTG GGCTAGCTACAACGA TAAAATCT | 2678 |
| 1571 | UUUAACAA G UAUAAAAA | 351 | TTTTTATA GGCTAGCTACAACGA TTGTTAAA | 2679 |
| 1573 | UAACAAGU A UAAAAAAA | 352 | TTTTTTTA GGCTAGCTACAACGA ACTTGTTA | 2680 |
| 1581 | AUAAAAAA A UUCUCAUA | 353 | TATGAGAA GGCTAGCTACAACGA TTTTTTAT | 2681 |
| 1587 | AAAUUCUC A UAGGAAUU | 354 | AATTCCTA GGCTAGCTACAACGA GAGAATTT | 2682 |
| 1593 | UCAUAGGA A UUAAAUGU | 355 | ACATTTAA GGCTAGCTACAACGA TCCTATGA | 2683 |
| 1598 | GGAAUUAA A UGUAGUCU | 356 | AGACTACA GGCTAGCTACAACGA TTAATTCC | 2684 |
| 1600 | AAUUAAAU G UAGUCUCC | 357 | GGAGACTA GGCTAGCTACAACGA ATTTAATT | 2685 |
| 1603 | UAAAUGUA G UCUCCCUG | 358 | CAGGGAGA GGCTAGCTACAACGA TACATTTA | 2686 |
| 1611 | GUCUCCCU G UGUCAGAC | 359 | GTCTGACA GGCTAGCTACAACGA AGGGAGAC | 2687 |
| 1613 | CUCCCUGU G UCAGACUG | 360 | CAGTCTGA GGCTAGCTACAACGA ACAGGGAG | 2688 |
| 1618 | UGUGUCAG A CUGCUCUU | 361 | AAGAGCAG GGCTAGCTACAACGA CTGACACA | 2689 |
| 1621 | GUCAGACU G CUCUUUCA | 362 | TGAAAGAG GGCTAGCTACAACGA AGTCTGAC | 2690 |
| 1629 | GCUCUUUC A UAGUAUAA | 363 | TTATACTA GGCTAGCTACAACGA GAAAGAGC | 2691 |
| 1632 | CUUUCAUA G UAUAACUU | 364 | AAGTTATA GGCTAGCTACAACGA TATGAAAG | 2692 |
| 1634 | UUCAUAGU A UAACUUUA | 365 | TAAAGTTA GGCTAGCTACAACGA ACTATGAA | 2693 |
| 1637 | AUAGUAUA A CUUUAAAU | 366 | ATTTAAAG GGCTAGCTACAACGA TATACTAT | 2694 |
| 1644 | AACUUUAA A UCUUUUCU | 367 | AGAAAAGA GGCTAGCTACAACGA TTAAAGTT | 2695 |
| 1656 | UUUCUUGA A CUUGAGUC | 368 | GACTCAAG GGCTAGCTACAACGA TGAAGAAA | 2696 |
| 1662 | CAAGUUGA G UCUUUGAA | 369 | TTCAAAGA GGCTAGCTACAACGA TCAAGTTG | 2697 |
| 1672 | CUUUGAAG A UAGUUUUA | 370 | TAAAACTA GGCTAGCTACAACGA CTTCAAAG | 2698 |
| 1675 | UGAAGAUA G UUUUAAUU | 371 | AATTAAAA GGCTAGCTACAACGA TATCTTCA | 2699 |
| 1681 | UAGUUUUA A UUCUGCUU | 372 | AAGCAGAA GGCTAGCTACAACGA TAAAACTA | 2700 |
| 1686 | UUAAUUCU G CUUGUGAC | 373 | GTCACAAG GGCTAGCTACAACGA AGAATTAA | 2701 |
| 1690 | UUCUGCUU G UGACAUUA | 374 | TAATGTCA GGCTAGCTACAACGA AAGCAGAA | 2702 |
| 1693 | UGCUUGUG A CAUUAAAA | 375 | TTTTAATG GGCTAGCTACAACGA CACAAGCA | 2703 |
| 1695 | CUUGUGAC A UUAAAAGA | 376 | TCTTTTAA GGCTAGCTACAACGA GTCACAAG | 2704 |
| 1703 | AUUAAAAG A UUAUUUGG | 377 | CCAAATAA GGCTAGCTACAACGA CTTTTAAT | 2705 |
| 1706 | AAAAGAUU A UUUGGGCC | 378 | GGCCCAAA GGCTAGCTACAACGA AATCTTTT | 2706 |
| 1712 | UUAUUUGG G CCAGUUAU | 379 | ATAACTGG GGCTAGCTACAACGA CCAAATAA | 2707 |
| 1716 | UUGGGCCA G UUAUAGCU | 380 | AGCTATAA GGCTAGCTACAACGA TGGCCCAA | 2708 |
| 1719 | GGCCAGUU A UAGCUUAU | 381 | ATAAGCTA GGCTAGCTACAACGA AACTGGCC | 2709 |
| 1722 | CAGUUAUA G CUUAUUAG | 382 | CTAATAAG GGCTAGCTACAACGA TATAACTG | 2710 |
| 1726 | UAUAGCUU A UUAGGUGU | 383 | ACACCTAA GGCTAGCTACAACGA AAGCTATA | 2711 |
| 1731 | CUUAUUAG G UGUUGAAG | 384 | CTTCAACA GGCTAGCTACAACGA CTAATAAG | 2712 |
| 1733 | UAUUAGGU G UUGAAGAG | 385 | CTCTTCAA GGCTAGCTACAACGA ACCTAATA | 2713 |
| 1742 | UUGAAGAG A CCAAGGUU | 386 | AACCTTGG GGCTAGCTACAACGA CTCTTCAA | 2714 |
| 1748 | AGACCAAG G UUGCAAGC | 387 | GCTTGCAA GGCTAGCTACAACGA CTTGGTCT | 2715 |
| 1751 | CCAAGGUU G CAAGCCAG | 388 | CTGGCTTG GGCTAGCTACAACGA AACCTTGG | 2716 |
| 1755 | GGUUGCAA G CCAGGCCC | 389 | GGGCCTGG GGCTAGCTACAACGA TTGCAACC | 2717 |
| 1760 | CAAGCCAG G CCCUGUGU | 390 | ACACAGGG GGCTAGCTACAACGA CTGGCTTG | 2718 |
| 1765 | CAGGCCCU G UGUGAACC | 391 | GGTTCACA GGCTAGCTACAACGA AGGGCCTG | 2719 |
| 1767 | GGCCCUGU G UGAACCUU | 392 | AAGGTTCA GGCTAGCTACAACGA ACAGGGCC | 2720 |
| 1772 | CUGUGUGA A CCUUGAGC | 393 | GCTCAAGG GGCTAGCTACAACGA TCACACAG | 2721 |
| 1778 | AACCUUGA G CUUUCAUA | 394 | TATGAAAG GGCTAGCTACAACGA TCAAGGTT | 2722 |
| 1784 | GAGCUUUC A UAGAGAGU | 395 | ACTCTCTA GGCTAGCTACAACGA GAAAGCTC | 2723 |
| 1791 | CAUAGAGA G UUUCACAG | 396 | CTGTGAAA GGCTAGCTACAACGA TCTCTATG | 2724 |
| 1796 | AGAGUUUC A CAGCAUGG | 397 | CCATGCTG GGCTAGCTACAACGA GAAACTCT | 2725 |
| 1799 | GUUUCACA G CAUGGACU | 398 | AGTCCATG GGCTAGCTACAACGA TGTGAAAC | 2726 |
| 1801 | UUCACAGC A UGGACUGU | 399 | ACAGTCCA GGCTAGCTACAACGA GCTGTGAA | 2727 |
| 1805 | CAGCAUGG A CUGUGUGC | 400 | GCACACAG GGCTAGCTACAACGA CCATGCTG | 2728 |
| 1808 | CAUGGACU G UGUGCCCC | 401 | GGGGCACA GGCTAGCTACAACGA AGTCCATG | 2729 |
| 1810 | UGGACUGU G UGCCCCAC | 402 | GTGGGGCA GGCTAGCTACAACGA ACAGTCCA | 2730 |
| 1812 | GACUGUGU G CCCCACGG | 403 | CCGTGGGG GGCTAGCTACAACGA ACACAGTC | 2731 |
| 1817 | UGUGCCCC A CGGUCAUC | 404 | GATGACCG GGCTAGCTACAACGA GGGGCACA | 2732 |
| 1820 | GCCCCACG G UCAUCCGA | 405 | TCGGATGA GGCTAGCTACAACGA CGTGGGGC | 2733 |
| 1823 | CCACGGUC A UCCGAGUG | 406 | CACTCGGA GGCTAGCTACAACGA GACCGTGG | 2734 |
| 1829 | UCAUCCGA G UGGUUGUA | 407 | TACAACCA GGCTAGCTACAACGA TCGGATGA | 2735 |
| 1832 | UCCGAGUG G UUGUACGA | 408 | TCGTACAA GGCTAGCTACAACGA CACTCGGA | 2736 |
| 1835 | GAGUGGUU G UACGAUGC | 409 | GCATCGTA GGCTAGCTACAACGA AACCACTC | 2737 |
| 1837 | GUGGUUGU A CGAUGCAU | 410 | ATGCATCG GGCTAGCTACAACGA ACAACCAC | 2738 |
| 1840 | GUUGUACG A UGCAUUGG | 411 | CCAATGCA GGCTAGCTACAACGA CGTACAAC | 2739 |
| 1842 | UGUACGAU G CAUUGGUU | 412 | AACCAATG GGCTAGCTACAACGA ATCGTACA | 2740 |
| 1844 | UACGAUGC A UUGGUUAG | 413 | CTAACCAA GGCTAGCTACAACGA GCATCGTA | 2741 |
| 1848 | AUGCAUUG G UUAGUCAA | 414 | TTGACTAA GGCTAGCTACAACGA CAATGCAT | 2742 |
| 1852 | AUUGGUUA G UCAAAAAU | 415 | ATTTTTGA GGCTAGCTACAACGA TAACCAAT | 2743 |
| 1859 | AGUCAAAA A UGGGGAGG | 416 | CCTCCCCA GGCTAGCTACAACGA TTTTGACT | 2744 |
| 1869 | GGGGAGGG A CUAGGGCA | 417 | TGCCCTAG GGCTAGCTACAACGA CCCTCCCC | 2745 |
| 1875 | GGACUAGG G CAGUUUGG | 418 | CCAAACTG GGCTAGCTACAACGA CCTAGTCC | 2746 |
| 1878 | CUAGGGCA G UUUGGAUA | 419 | TATCCAAA GGCTAGCTACAACGA TGCCCTAG | 2747 |
| 1884 | CAGUUUGG A UAGCUCAA | 420 | TTGAGCTA GGCTAGCTACAACGA CCAAACTG | 2748 |
| 1887 | UUUGGAUA G CUCAACAA | 421 | TTGTTGAG GGCTAGCTACAACGA TATCCAAA | 2749 |
| 1892 | AUAGCUCA A CAAGAUAC | 422 | GTATCTTG GGCTAGCTACAACGA TGAGCTAT | 2750 |
| 1897 | UCAACAAG A UACAAUCU | 423 | AGATTGTA GGCTAGCTACAACGA CTTGTTGA | 2751 |
| 1899 | AACAAGAU A CAAUCUCA | 424 | TGAGATTG GGCTAGCTACAACGA ATCTTGTT | 2752 |
| 1902 | AAGAUACA A UCUCACUC | 425 | GAGTGAGA GGCTAGCTACAACGA TGTATCTT | 2753 |
| 1907 | ACAAUCUC A CUCUGUGG | 426 | CCACAGAG GGCTAGCTACAACGA GAGATTGT | 2754 |
| 1912 | CUCACUCU G UGGUGGUC | 427 | GACCACCA GGCTAGCTACAACGA AGAGTGAG | 2755 |
| 1915 | ACUCUGUG G UGGUCCUG | 428 | CAGGACCA GGCTAGCTACAACGA CACAGAGT | 2756 |
| 1918 | CUGUGGUG G UCCUGCUG | 429 | CAGCAGGA GGCTAGCTACAACGA CACCACAG | 2757 |
| 1923 | GUGGUCCU G CUGACAAA | 430 | TTTGTCAG GGCTAGCTACAACGA AGGACCAC | 2758 |
| 1927 | UCCUGCUG A CAAAUCAA | 431 | TTGATTTG GGCTAGCTACAACGA CAGCAGGA | 2759 |
| 1931 | GCUGACAA A UCAAGAGC | 432 | GCTCTTGA GGCTAGCTACAACGA TTGTCAGC | 2760 |
| 1938 | AAUCAAGA G CAUUGCUU | 433 | AAGCAATG GGCTAGCTACAACGA TCTTGATT | 2761 |
| 1940 | UCAAGAGC A UUGCUUUU | 434 | AAAAGCAA GGCTAGCTACAACGA GCTCTTGA | 2762 |
| 1943 | AGAGCAUU G CUUUUGUU | 435 | AACAAAAG GGCTAGCTACAACGA AATGCTCT | 2763 |
| 1949 | UUGCUUUU G UUUCUUAA | 436 | TTAAGAAA GGCTAGCTACAACGA AAAAGCAA | 2764 |
| 1962 | UUAAGAAA A CAAACUCU | 437 | AGAGTTTG GGCTAGCTACAACGA TTTCTTAA | 2765 |
| 1966 | GAAAACAA A CUCUUUUU | 438 | AAAAAGAG GGCTAGCTACAACGA TTGTTTTC | 2766 |
| 1980 | UUUUAAAA A UUACUUUU | 439 | AAAAGTAA GGCTAGCTACAACGA TTTTAAAA | 2767 |
| 1983 | UAAAAAUU A CUUUUAAA | 440 | TTTAAAAG GGCTAGCTACAACGA AATTTTTA | 2768 |
| 1991 | ACUUUUAA A UAUUAACU | 441 | AGTTAATA GGCTAGCTACAACGA TTAAAAGT | 2769 |
| 1993 | UUUUAAAU A UUAACUCA | 442 | TGAGTTAA GGCTAGCTACAACGA ATTTAAAA | 2770 |
| 1997 | AAAUAUUA A CUCAAAAG | 443 | CTTTTGAG GGCTAGCTACAACGA TAATATTT | 2771 |
| 2005 | ACUCAAAA G UUGAGAUU | 444 | AATCTCAA GGCTAGCTACAACGA TTTTGAGT | 2772 |
| 2011 | AAGUUGAG A UUUUGGGG | 445 | CCCCAAAA GGCTAGCTACAACGA CTCAACTT | 2773 |
| 2019 | AUUUUGGG G UGGUGGUG | 446 | CACCACCA GGCTAGCTACAACGA CCCAAAAT | 2774 |
| 2022 | UUGGGGUG G UGGUGUGC | 447 | GCACACCA GGCTAGCTACAACGA CACCCCAA | 2775 |
| 2025 | GGGUGGUG G UGUGCCAA | 448 | TTGGCACA GGCTAGCTACAACGA CACCACCC | 2776 |
| 2027 | GUGGUGGU G UGCCAAGA | 449 | TCTTGGCA GGCTAGCTACAACGA ACCACCAC | 2777 |
| 2029 | GGUGGUGU G CCAAGACA | 450 | TGTCTTGG GGCTAGCTACAACGA ACACCACC | 2778 |
| 2035 | GUGCCAAG A CAUUAAUU | 451 | AATTAATG GGCTAGCTACAACGA CTTGGCAC | 2779 |
| 2037 | GCCAAGAC A UUAAUUUU | 452 | AAAATTAA GGCTAGCTACAACGA GTCTTGGC | 2780 |
| 2041 | AGACAUUA A UUUUUUUU | 453 | AAAAAAAA GGCTAGCTACAACGA TAATGTCT | 2781 |
| 2054 | UUUUUUAA A CAAUGAAG | 454 | CTTCATTG GGCTAGCTACAACGA TTAAAAAA | 2782 |
| 2057 | UUUAAACA A UGAAGUGA | 455 | TCACTTCA GGCTAGCTACAACGA TGTTTAAA | 2783 |
| 2062 | ACAAUGAA G UGAAAAAG | 456 | CTTTTTCA GGCTAGCTACAACGA TTCATTGT | 2784 |
| 2070 | GUGAAAAA G UUUUACAA | 457 | TTGTAAAA GGCTAGCTACAACGA TTTTTCAC | 2785 |
| 2075 | AAAGUUUU A CAAUCUCU | 458 | AGAGATTG GGCTAGCTACAACGA AAAACTTT | 2786 |
| 2078 | GUUUUACA A UCUCUAGG | 459 | CCTAGAGA GGCTAGCTACAACGA TGTAAAAC | 2787 |
| 2086 | AUCUCUAG G UUUGGCUA | 460 | TAGCCAAA GGCTAGCTACAACGA CTAGAGAT | 2788 |
| 2091 | UAGGUUUG G CUAGUUCU | 461 | AGAACTAG GGCTAGCTACAACGA CAAACCTA | 2789 |
| 2095 | UUUGGCUA G UUCUCUUA | 462 | TAAGAGAA GGCTAGCTACAACGA TAGCCAAA | 2790 |
| 2104 | UUCUCUUA A CACUGGUU | 463 | AACCAGTG GGCTAGCTACAACGA TAAGAGAA | 2791 |
| 2106 | CUCUUAAC A CUGGUUAA | 464 | TTAACCAG GGCTAGCTACAACGA GTTAAGAG | 2792 |
| 2110 | UAACACUG G UUAAAUUA | 465 | TAATTTAA GGCTAGCTACAACGA CAGTGTTA | 2793 |
| 2115 | CUGGUUAA A UUAACAUU | 466 | AATGTTAA GGCTAGCTACAACGA TTAACCAG | 2794 |
| 2119 | UUAAAUUA A CAUUGCAU | 467 | ATGCAATG GGCTAGCTACAACGA TAATTTAA | 2795 |
| 2121 | AAAUUAAC A UUGCAUAA | 468 | TTATGCAA GGCTAGCTACAACGA GTTAATTT | 2796 |
| 2124 | UUAACAUU G CAUAAACA | 469 | TGTTTATG GGCTAGCTACAACGA AATGTTAA | 2797 |
| 2126 | AACAUUGC A UAAACACU | 470 | AGTGTTTA GGCTAGCTACAACGA GCAATGTT | 2798 |
| 2130 | UUGCAUAA A CACUUUUC | 471 | GAAAAGTG GGCTAGCTACAACGA TTATGCAA | 2799 |
| 2132 | GCAUAAAC A CUUUUCAA | 472 | TTGAAAAG GGCTAGCTACAACGA GTTTATGC | 2800 |
| 2141 | CUUUUCAA G UCUGAUCC | 473 | GGATCAGA GGCTAGCTACAACGA TTGAAAAG | 2801 |
| 2146 | CAAGUCUG A UCCAUAUU | 474 | AATATGGA GGCTAGCTACAACGA CAGACTTG | 2802 |
| 2150 | UCUGAUCC A UAUUUAAU | 475 | ATTAAATA GGCTAGCTACAACGA GGATCAGA | 2803 |
| 2152 | UGAUCCAU A UUUAAUAA | 476 | TTATTAAA GGCTAGCTACAACGA ATGGATCA | 2804 |
| 2157 | CAUAUUUA A UAAUGCUU | 477 | AAGCATTA GGCTAGCTACAACGA TAAATATG | 2805 |
| 2160 | AUUUAAUA A UGCUUUAA | 478 | TTAAAGCA GGCTAGCTACAACGA TATTAAAT | 2806 |
| 2162 | UUAAUAAU G CUUUAAAA | 479 | TTTTAAAG GGCTAGCTACAACGA ATTATTAA | 2807 |
| 2170 | GCUUUAAA A UAAAAAUA | 480 | TATTTTTA GGCTAGCTACAACGA TTTAAAGC | 2808 |
| 2176 | AAAUAAAA A UAAAAACA | 481 | TGTTTTTA GGCTAGCTACAACGA TTTTATTT | 2809 |
| 2182 | AAAUAAAA A CAAUCCUU | 482 | AAGGATTG GGCTAGCTACAACGA TTTTATTT | 2810 |
| 2185 | UAAAAACA A UCCUUUUG | 483 | CAAAAGGA GGCTAGCTACAACGA TGTTTTTA | 2811 |
| 2194 | UCCUUUUG A UAAAUUUA | 484 | TAAATTTA GGCTAGCTACAACGA CAAAAGGA | 2812 |
| 2198 | UUUGAUAA A UUUAAAAU | 485 | ATTTTAAA GGCTAGCTACAACGA TTATCAAA | 2813 |
| 2205 | AAUUUAAA A UGUUACUU | 486 | AAGTAACA GGCTAGCTACAACGA TTTAAATT | 2814 |
| 2207 | UUUAAAAU G UUACUUAU | 487 | ATAAGTAA GGCTAGCTACAACGA ATTTTAAA | 2815 |
| 2210 | AAAAUGUU A CUUAUUUU | 488 | AAAATAAG GGCTAGCTACAACGA AACATTTT | 2816 |
| 2214 | UGUUACUU A UUUUAAAA | 489 | TTTTAAAA GGCTAGCTACAACGA AAGTAACA | 2817 |
| 2222 | AUUUUAAA A UAAAUGAA | 490 | TTCATTTA GGCTAGCTACAACGA TTTAAAAT | 2818 |
| 2226 | UAAAAUAA A UGAAGUGA | 491 | TCACTTCA GGCTAGCTACAACGA TTATTTTA | 2819 |
| 2231 | UAAAUGAA G UGAGAUGG | 492 | CCATCTCA GGCTAGCTACAACGA TTCATTTA | 2820 |
| 2236 | GAAGUGAG A UGGCAUGG | 493 | CCATGCCA GGCTAGCTACAACGA CTCACTTC | 2821 |
| 2239 | GUGAGAUG G CAUGGUGA | 494 | TCACCATG GGCTAGCTACAACGA CATCTCAC | 2822 |
| 2241 | GAGAUGGC A UGGUGAGG | 495 | CCTCACCA GGCTAGCTACAACGA GCCATCTC | 2823 |
| 2244 | AUGGCAUG G UGAGGUGA | 496 | TCACCTCA GGCTAGCTACAACGA CATGCCAT | 2824 |
| 2249 | AUGGUGAG G UGAAAGUA | 497 | TACTTTCA GGCTAGCTACAACGA CTCACCAT | 2825 |
| 2255 | AGGUGAAA G UAUCACUG | 498 | CAGTGATA GGCTAGCTACAACGA TTTCACCT | 2826 |
| 2257 | GUGAAAGU A UCACUGGA | 499 | TCCAGTGA GGCTAGCTACAACGA ACTTTCAC | 2827 |
| 2260 | AAAGUAUC A CUGGACUA | 500 | TAGTCCAG GGCTAGCTACAACGA GATACTTT | 2828 |
| 2265 | AUCACUGG A CUAGGUUG | 501 | CAACCTAG GGCTAGCTACAACGA CCAGTGAT | 2829 |
| 2270 | UGGACUAG G UUGUUGGU | 502 | ACCAACAA GGCTAGCTACAACGA CTAGTCCA | 2830 |
| 2273 | ACUAGGUU G UUGGUGAC | 503 | GTCACCAA GGCTAGCTACAACGA AACCTAGT | 2831 |
| 2277 | GGUUGUUG G UGACUUAG | 504 | CTAAGTCA GGCTAGCTACAACGA CAACAACC | 2832 |
| 2280 | UGUUGGUG A CUUAGGUU | 505 | AACCTAAG GGCTAGCTACAACGA CACCAACA | 2833 |
| 2286 | UGACUUAG G UUCUAGAU | 506 | ATCTAGAA GGCTAGCTACAACGA CTAAGTCA | 2834 |
| 2293 | GGUUCUAG A UAGGUGUC | 507 | GACACCTA GGCTAGCTACAACGA CTAGAACC | 2835 |
| 2297 | CUAGAUAG G UGUCUUUU | 508 | AAAAGACA GGCTAGCTACAACGA CTATCTAG | 2836 |
| 2299 | AGAUAGGU G UCUUUUAG | 509 | CTAAAAGA GGCTAGCTACAACGA ACCTATCT | 2837 |
| 2309 | CUUUUAGG A CUCUGAUU | 510 | AATCAGAG GGCTAGCTACAACGA CCTAAAAG | 2838 |
| 2315 | GGACUCUG A UUUUGAGG | 511 | CCTCAAAA GGCTAGCTACAACGA CAGAGTCC | 2839 |
| 2324 | UUUUGAGG A CAUCACUU | 512 | AAGTGATG GGCTAGCTACAACGA CCTCAAAA | 2840 |
| 2326 | UUGAGGAC A UCACUUAC | 513 | GTAAGTGA GGCTAGCTACAACGA GTCCTCAA | 2841 |
| 2329 | AGGACAUC A CUUACUAU | 514 | ATAGTAAG GGCTAGCTACAACGA GATGTCCT | 2842 |
| 2333 | CAUCACUU A CUAUCCAU | 515 | ATGGATAG GGCTAGCTACAACGA AAGTGATG | 2843 |
| 2336 | CACUUACU A UCCAUUUC | 516 | GAAATGGA GGCTAGCTACAACGA AGTAAGTG | 2844 |
| 2340 | UACUAUCC A UUUCUUCA | 517 | TGAAGAAA GGCTAGCTACAACGA GGATAGTA | 2845 |
| 2348 | AUUUCUUC A UGUUAAAA | 518 | TTTTAACA GGCTAGCTACAACGA GAAGAAAT | 2846 |
| 2350 | UUCUUCAU G UUAAAAGA | 519 | TCTTTTAA GGCTAGCTACAACGA ATGAAGAA | 2847 |
| 2360 | UAAAAGAA G UCAUCUCA | 520 | TGAGATGA GGCTAGCTACAACGA TTCTTTTA | 2848 |
| 2363 | AAGAAGUC A UCUCAAAC | 521 | GTTTGAGA GGCTAGCTACAACGA GACTTCTT | 2849 |
| 2370 | CAUCUCAA A CUCUUAGU | 522 | ACTAAGAG GGCTAGCTACAACGA TTGAGATG | 2850 |
| 2377 | AACUCUUA G UUUUUUUU | 523 | AAAAAAAA GGCTAGCTACAACGA TAAGAGTT | 2851 |
| 2390 | UUUUUUUU A CACUAUGU | 524 | ACATAGTG GGCTAGCTACAACGA AAAAAAAA | 2852 |
| 2392 | UUUUUUAC A CUAUGUGA | 525 | TCACATAG GGCTAGCTACAACGA GTAAAAAA | 2853 |
| 2395 | UUUACACU A UGUGAUUU | 526 | AAATCACA GGCTAGCTACAACGA AGTGTAAA | 2854 |
| 2397 | UACACUAU G UGAUUUAU | 527 | ATAAATCA GGCTAGCTACAACGA ATAGTGTA | 2855 |
| 2400 | ACUAUGUG A UUUAUAUU | 528 | AATATAAA GGCTAGCTACAACGA CACATAGT | 2856 |
| 2404 | UGUGAUUU A UAUUCCAU | 529 | ATGGAATA GGCTAGCTACAACGA AAATCACA | 2857 |
| 2406 | UGAUUUAU A UUCCAUUU | 530 | AAATGGAA GGCTAGCTACAACGA ATAAATCA | 2858 |
| 2411 | UAUAUUCC A UUUACAUA | 531 | TATGTAAA GGCTAGCTACAACGA GGAATATA | 2859 |
| 2415 | UUCCAUUU A CAUAAGGA | 532 | TCCTTATG GGCTAGCTACAACGA AAATGGAA | 2860 |
| 2417 | CCAUUUAC A UAAGGAUA | 533 | TATCCTTA GGCTAGCTACAACGA GTAAATGG | 2861 |
| 2423 | ACAUAAGG A UACACUUA | 534 | TAAGTGTA GGCTAGCTACAACGA CCTTATGT | 2862 |
| 2425 | AUAAGGAU A CACUUAUU | 535 | AATAAGTG GGCTAGCTACAACGA ATCCTTAT | 2863 |
| 2427 | AAGGAUAC A CUUAUUUG | 536 | CAAATAAG GGCTAGCTACAACGA GTATCCTT | 2864 |
| 2431 | AUACACUU A UUUGUCAA | 537 | TTGACAAA GGCTAGCTACAACGA AAGTGTAT | 2865 |
| 2435 | ACUUAUUU G UCAAGCUC | 538 | GAGCTTGA GGCTAGCTACAACGA AAATAAGT | 2866 |
| 2440 | UUUGUCAA G CUCAGCAC | 539 | GTGCTGAG GGCTAGCTACAACGA TTGACAAA | 2867 |
| 2445 | CAAGCUCA G CACAAUCU | 540 | AGATTGTG GGCTAGCTACAACGA TGAGCTTG | 2868 |
| 2447 | AGCUCAGC A CAAUCUGU | 541 | ACAGATTG GGCTAGCTACAACGA GCTGAGCT | 2869 |
| 2450 | UCAGCACA A UCUGUAAA | 542 | TTTACAGA GGCTAGCTACAACGA TGTGCTGA | 2870 |
| 2454 | CACAAUCU G UAAAUUUU | 543 | AAAATTTA GGCTAGCTACAACGA AGATTGTG | 2871 |
| 2458 | AUCUGUAA A UUUUUAAC | 544 | GTTAAAAA GGCTAGCTACAACGA TTACAGAT | 2872 |
| 2465 | AAUUUUUA A CCUAUGUU | 545 | AACATAGG GGCTAGCTACAACGA TAAAAATT | 2873 |
| 2469 | UUUAACCU A UGUUACAC | 546 | GTGTAACA GGCTAGCTACAACGA AGGTTAAA | 2874 |
| 2471 | UAACCUAU G UUACACCA | 547 | TGGTGTAA GGCTAGCTACAACGA ATAGGTTA | 2875 |
| 2474 | CCUAUGUU A CACCAUCU | 548 | AGATGGTG GGCTAGCTACAACGA AACATAGG | 2876 |
| 2476 | UAUGUUAC A CCAUCUUC | 549 | GAAGATGG GGCTAGCTACAACGA GTAACATA | 2877 |
| 2479 | GUUACACC A UCUUCAGU | 550 | ACTGAAGA GGCTAGCTACAACGA GGTGTAAC | 2878 |
| 2486 | CAUCUUCA G UGCCAGUC | 551 | GACTGGCA GGCTAGCTACAACGA TGAAGATG | 2879 |
| 2488 | UCUUCAGU G CCAGUCUU | 552 | AAGACTGG GGCTAGCTACAACGA ACTGAAGA | 2880 |
| 2492 | CAGUGCCA G UCUUGGGC | 553 | GCCCAAGA GGCTAGCTACAACGA TGGCACTG | 2881 |
| 2499 | AGUCUUGG G CAAAAUUG | 554 | CAATTTTG GGCTAGCTACAACGA CCAAGACT | 2882 |
| 2504 | UGGGCAAA A UUGUGCAA | 555 | TTGCACAA GGCTAGCTACAACGA TTTGCCCA | 2883 |
| 2507 | GCAAAAUU G UGCAAGAG | 556 | CTCTTGCA GGCTAGCTACAACGA AATTTTGC | 2884 |
| 2509 | AAAAUUGU G CAAGAGGU | 557 | ACCTCTTG GGCTAGCTACAACGA ACAATTTT | 2885 |
| 2516 | UGCAAGAG G UGAAGUUU | 558 | AAACTTCA GGCTAGCTACAACGA CTCTTGCA | 2886 |
| 2521 | GAGGUGAA G UUUAUAUU | 559 | AATATAAA GGCTAGCTACAACGA TTCACCTC | 2887 |
| 2525 | UGAAGUUU A UAUUUGAA | 560 | TTCAAATA GGCTAGCTACAACGA AAACTTCA | 2888 |
| 2527 | AAGUUUAU A UUUGAAUA | 561 | TATTCAAA GGCTAGCTACAACGA ATAAACTT | 2889 |
| 2533 | AUAUUUGA A UAUCCAUU | 562 | AATGGATA GGCTAGCTACAACGA TCAAATAT | 2890 |
| 2535 | AUUUGAAU A UCCAUUCU | 563 | AGAATGGA GGCTAGCTACAACGA ATTCAAAT | 2891 |
| 2539 | GAAUAUCC A UUCUCGUU | 564 | AACGAGAA GGCTAGCTACAACGA GGATATTC | 2892 |
| 2545 | CCAUUCUC G UUUUAGGA | 565 | TCCTAAAA GGCTAGCTACAACGA GAGAATGG | 2893 |
| 2553 | GUUUUAGG A CUCUUCUU | 566 | AAGAAGAG GGCTAGCTACAACGA CCTAAAAC | 2894 |
| 2564 | CUUCUUCC A UAUUAGUG | 567 | CACTAATA GGCTAGCTACAACGA GGAAGAAG | 2895 |
| 2566 | UCUUCCAU A UUAGUGUC | 568 | GACACTAA GGCTAGCTACAACGA ATGGAAGA | 2896 |
| 2570 | CCAUAUUA G UGUCAUCU | 569 | AGATGACA GGCTAGCTACAACGA TAATATGG | 2897 |
| 2572 | AUAUUAGU G UCAUCUUG | 570 | CAAGATGA GGCTAGCTACAACGA ACTAATAT | 2898 |
| 2575 | UUAGUGUC A UCUUGCCU | 571 | AGGCAAGA GGCTAGCTACAACGA GACACTAA | 2899 |
| 2580 | GUCAUCUU G CCUCCCUA | 572 | TAGGGAGG GGCTAGCTACAACGA AAGATGAC | 2900 |
| 2588 | GCCUCCCU A CCUUCCAC | 573 | GTGGAAGG GGCTAGCTACAACGA AGGGAGGC | 2901 |
| 2595 | UACCUUCC A CAUGCCCC | 574 | GGGGCATG GGCTAGCTACAACGA GGAAGGTA | 2902 |
| 2597 | CCUUCCAC A UGCCCCAU | 575 | ATGGGGCA GGCTAGCTACAACGA GTGGAAGG | 2903 |
| 2599 | UUCCACAU G CCCCAUGA | 576 | TCATGGGG GGCTAGCTACAACGA ATGTGGAA | 2904 |
| 2604 | CAUGCCCC A UGACUUGA | 577 | TCAAGTCA GGCTAGCTACAACGA GGGGCATG | 2905 |
| 2607 | GCCCCAUG A CUUGAUGC | 578 | GCATCAAG GGCTAGCTACAACGA CATGGGGC | 2906 |
| 2612 | AUGACUUG A UGCAGUUU | 579 | AAACTGCA GGCTAGCTACAACGA CAAGTCAT | 2907 |
| 2614 | GACUUGAU G CAGUUUUA | 580 | TAAAACTG GGCTAGCTACAACGA ATCAAGTC | 2908 |
| 2617 | UUGAUGCA G UUUUAAUA | 581 | TATTAAAA GGCTAGCTACAACGA TGCATCAA | 2909 |
| 2623 | CAGUUUUA A UACUUGUA | 582 | TACAAGTA GGCTAGCTACAACGA TAAAACTG | 2910 |
| 2625 | GUUUUAAU A CUUGUAAU | 583 | ATTACAAG GGCTAGCTACAACGA ATTAAAAC | 2911 |
| 2629 | UAAUACUU G UAAUUCCC | 584 | GGGAATTA GGCTAGCTACAACGA AAGTATTA | 2912 |
| 2632 | UACUUGUA A UUCCCCUA | 585 | TAGGGGAA GGCTAGCTACAACGA TACAAGTA | 2913 |
| 2641 | UUCCCCUA A CCAUAAGA | 586 | TCTTATGG GGCTAGCTACAACGA TAGGGGAA | 2914 |
| 2644 | CCCUAACC A UAAGAUUU | 587 | AAATCTTA GGCTAGCTACAACGA GGTTAGGG | 2915 |
| 2649 | ACCAUAAG A UUUACUGC | 588 | GCAGTAAA GGCTAGCTACAACGA CTTATGGT | 2916 |
| 2653 | UAAGAUUU A CUGCUGCU | 589 | AGCAGCAG GGCTAGCTACAACGA AAATCTTA | 2917 |
| 2656 | GAUUUACU G CUGCUGUG | 590 | CACAGCAG GGCTAGCTACAACGA AGTAAATC | 2918 |
| 2659 | UUACUGCU G CUGUGGAU | 591 | ATCCACAG GGCTAGCTACAACGA AGCAGTAA | 2919 |
| 2662 | CUGCUGCU G UGGAUAUC | 592 | GATATCCA GGCTAGCTACAACGA AGCAGCAG | 2920 |
| 2666 | UGCUGUGG A UAUCUCCA | 593 | TGGAGATA GGCTAGCTACAACGA CCACAGCA | 2921 |
| 2668 | CUGUGGAU A UCUCCAUG | 594 | CATGGAGA GGCTAGCTACAACGA ATCCACAG | 2922 |
| 2674 | AUAUCUCC A UGAAGUUU | 595 | AAACTTCA GGCTAGCTACAACGA GGAGATAT | 2923 |
| 2679 | UCCAUGAA G UUUUCCCA | 596 | TGGGAAAA GGCTAGCTACAACGA TTCATGGA | 2924 |
| 2687 | GUUUUCCC A CUGAGUCA | 597 | TGACTCAG GGCTAGCTACAACGA GGGAAAAC | 2925 |
| 2692 | CCCACUGA G UCACAUCA | 598 | TGATGTGA GGCTAGCTACAACGA TCAGTGGG | 2926 |
| 2695 | ACUGAGUC A CAUCAGAA | 599 | TTCTGATG GGCTAGCTACAACGA GACTCAGT | 2927 |
| 2697 | UGAGUCAC A UCAGAAAU | 600 | ATTTCTGA GGCTAGCTACAACGA GTGACTCA | 2928 |
| 2704 | CAUCAGAA A UGCCCUAC | 601 | GTAGGGCA GGCTAGCTACAACGA TTCTGATG | 2929 |
| 2706 | UCAGAAAU G CCCUACAU | 602 | ATGTAGGG GGCTAGCTACAACGA ATTTCTGA | 2930 |
| 2711 | AAUGCCCU A CAUCUUAU | 603 | ATAAGATG GGCTAGCTACAACGA AGGGCATT | 2931 |
| 2713 | UGCCCUAC A UCUUAUUU | 604 | AAATAAGA GGCTAGCTACAACGA GTAGGGCA | 2932 |
| 2718 | UACAUCUU A UUUUCCUC | 605 | GAGGAAAA GGCTAGCTACAACGA AAGATGTA | 2933 |
| 2730 | UCCUCAGG G CUCAAGAG | 606 | CTCTTGAG GGCTAGCTACAACGA CCTGAGGA | 2934 |
| 2740 | UCAAGAGA A UCUGACAG | 607 | CTGTCAGA GGCTAGCTACAACGA TCTCTTGA | 2935 |
| 2745 | AGAAUCUG A CAGAUACC | 608 | GGTATCTG GGCTAGCTACAACGA CAGATTCT | 2936 |
| 2749 | UCUGACAG A UACCAUAA | 609 | TTATGGTA GGCTAGCTACAACGA CTGTCAGA | 2937 |
| 2751 | UGACAGAU A CCAUAAAG | 610 | CTTTATGG GGCTAGCTACAACGA ATCTGTCA | 2938 |
| 2754 | CAGAUACC A UAAAGGGA | 611 | TCCCTTTA GGCTAGCTACAACGA GGTATCTG | 2939 |
| 2762 | AUAAAGGG A UUUGACCU | 612 | AGGTCAAA GGCTAGCTACAACGA CCCTTTAT | 2940 |
| 2767 | GGGAUUUG A CCUAAUCA | 613 | TGATTAGG GGCTAGCTACAACGA CAAATCCC | 2941 |
| 2772 | UUGACCUA A UCACUAAU | 614 | ATTAGTGA GGCTAGCTACAACGA TAGGTCAA | 2942 |
| 2775 | ACCUAAUC A CUAAUUUU | 615 | AAAATTAG GGCTAGCTACAACGA GATTAGGT | 2943 |
| 2779 | AAUCACUA A UUUUCAGG | 616 | CCTGAAAA GGCTAGCTACAACGA TAGTGATT | 2944 |
| 2787 | AUUUUCAG G UGGUGGCU | 617 | AGCCACCA GGCTAGCTACAACGA CTGAAAAT | 2945 |
| 2790 | UUCAGGUG G UGGCUGAU | 618 | ATCAGCCA GGCTAGCTACAACGA CACCTGAA | 2946 |
| 2793 | AGGUGGUG G CUGAUGCU | 619 | AGCATCAG GGCTAGCTACAACGA CACCACCT | 2947 |
| 2797 | GGUGGCUG A UGCUUUGA | 620 | TCAAAGCA GGCTAGCTACAACGA CAGCCACC | 2948 |
| 2799 | UGGCUGAU G CUUUGAAC | 621 | GTTCAAAG GGCTAGCTACAACGA ATCAGCCA | 2949 |
| 2806 | UGCUUUGA A CAUCUCUU | 622 | AAGAGATG GGCTAGCTACAACGA TCAAAGCA | 2950 |
| 2808 | CUUUGAAC A UCUCUUUG | 623 | CAAAGAGA GGCTAGCTACAACGA GTTCAAAG | 2951 |
| 2816 | AUCUCUUU G CUGCCCAA | 624 | TTGGGCAG GGCTAGCTACAACGA AAAGAGAT | 2952 |
| 2819 | UCUUUGCU G CCCAAUCC | 625 | GGATTGGG GGCTAGCTACAACGA AGCAAAGA | 2953 |
| 2824 | GCUGCCCA A UCCAUUAG | 626 | CTAATGGA GGCTAGCTACAACGA TGGGCAGC | 2954 |
| 2828 | CCCAAUCC A UUAGCGAC | 627 | GTCGCTAA GGCTAGCTACAACGA GGATTGGG | 2955 |
| 2832 | AUCCAUUA G CGACAGUA | 628 | TACTGTCG GGCTAGCTACAACGA TAATGGAT | 2956 |
| 2835 | CAUUAGCG A CAGUAGGA | 629 | TCCTACTG GGCTAGCTACAACGA CGCTAATG | 2957 |
| 2838 | UAGCGACA G UAGGAUUU | 630 | AAATCCTA GGCTAGCTACAACGA TGTCGCTA | 2958 |
| 2843 | ACAGUAGG A UUUUUCAA | 631 | TTGAAAAA GGCTAGCTACAACGA CCTACTGT | 2959 |
| 2851 | AUUUUUCA A CCCUGGUA | 632 | TACCAGGG GGCTAGCTACAACGA TGAAAAAT | 2960 |
| 2857 | CAACCCUG G UAUGAAUA | 633 | TATTCATA GGCTAGCTACAACGA CAGGGTTG | 2961 |
| 2859 | ACCCUGGU A UGAAUAGA | 634 | TCTATTCA GGCTAGCTACAACGA ACCAGGGT | 2962 |
| 2863 | UGGUAUGA A UAGACAGA | 635 | TCTGTCTA GGCTAGCTACAACGA TCATACCA | 2963 |
| 2867 | AUGAAUAG A CAGAACCC | 636 | GGGTTCTG GGCTAGCTACAACGA CTATTCAT | 2964 |
| 2872 | UAGACAGA A CCCUAUCC | 637 | GGATAGGG GGCTAGCTACAACGA TCTGTCTA | 2965 |
| 2877 | AGAACCCU A UCCAGUGG | 638 | CCACTGGA GGCTAGCTACAACGA AGGGTTCT | 2966 |
| 2882 | CCUAUCCA G UGGAAGGA | 639 | TCCTTCCA GGCTAGCTACAACGA TGGATAGG | 2967 |
| 2893 | GAAGGAGA A UUUAAUAA | 640 | TTATTAAA GGCTAGCTACAACGA TCTCCTTC | 2968 |
| 2898 | AGAAUUUA A UAAAGAUA | 641 | TATCTTTA GGCTAGCTACAACGA TAAATTCT | 2969 |
| 2904 | UAAUAAAG A UAGUGCAG | 642 | CTGCACTA GGCTAGCTACAACGA CTTTATTA | 2970 |
| 2907 | UAAAGAUA G UGCAGAAA | 643 | TTTCTGCA GGCTAGCTACAACGA TATCTTTA | 2971 |
| 2909 | AAGAUAGU G CAGAAAGA | 644 | TCTTTCTG GGCTAGCTACAACGA ACTATCTT | 2972 |
| 2918 | CAGAAAGA A UUCCUUAG | 645 | CTAAGGAA GGCTAGCTACAACGA TCTTTCTG | 2973 |
| 2927 | UUCCUUAG G UAAUCUAU | 646 | ATAGATTA GGCTAGCTACAACGA CTAAGGAA | 2974 |
| 2930 | CUUAGGUA A UCUAUAAC | 647 | GTTATAGA GGCTAGCTACAACGA TACCTAAG | 2975 |
| 2934 | GGUAAUCU A UAACUAGG | 648 | CCTAGTTA GGCTAGCTACAACGA AGATTACC | 2976 |
| 2937 | AAUCUAUA A CUAGGACU | 649 | AGTCCTAG GGCTAGCTACAACGA TATAGATT | 2977 |
| 2943 | UAACUAGG A CUACUCCU | 650 | AGGAGTAG GGCTAGCTACAACGA CCTAGTTA | 2978 |
| 2946 | CUAGGACU A CUCCUGGU | 651 | ACCAGGAG GGCTAGCTACAACGA AGTCCTAG | 2979 |
| 2953 | UACUCCUG G UAACAGUA | 652 | TACTGTTA GGCTAGCTACAACGA CAGGAGTA | 2980 |
| 2956 | UCCUGGUA A CAGUAAUA | 653 | TATTACTG GGCTAGCTACAACGA TACCAGGA | 2981 |
| 2959 | UGGUAACA G UAAUACAU | 654 | ATGTATTA GGCTAGCTACAACGA TGTTACCA | 2982 |
| 2962 | UAACAGUA A UACAUUCC | 655 | GGAATGTA GGCTAGCTACAACGA TACTGTTA | 2983 |
| 2964 | ACAGUAAU A CAUUCCAU | 656 | ATGGAATG GGCTAGCTACAACGA ATTACTGT | 2984 |
| 2966 | AGUAAUAC A UUCCAUUG | 657 | CAATGGAA GGCTAGCTACAACGA GTATTACT | 2985 |
| 2971 | UACAUUCC A UUGUUUUA | 658 | TAAAACAA GGCTAGCTACAACGA GGAATGTA | 2986 |
| 2974 | AUUCCAUU G UUUUAGUA | 659 | TACTAAAA GGCTAGCTACAACGA AATGGAAT | 2987 |
| 2980 | UUGUUUUA G UAACCAGA | 660 | TCTGGTTA GGCTAGCTACAACGA TAAAACAA | 2988 |
| 2983 | UUUUAGUA A CCAGAAAU | 661 | ATTTCTGG GGCTAGCTACAACGA TACTAAAA | 2989 |
| 2990 | AACCAGAA A UCUUCAUG | 662 | CATGAAGA GGCTAGCTACAACGA TTCTGGTT | 2990 |
| 2996 | AAAUCUUC A UGCAAUGA | 663 | TCATTGCA GGCTAGCTACAACGA GAAGATTT | 2991 |
| 2998 | AUCUUCAU G CAAUGAAA | 664 | TTTCATTG GGCTAGCTACAACGA ATGAAGAT | 2992 |
| 3001 | UUCAUGCA A UGAAAAAU | 665 | ATTTTTCA GGCTAGCTACAACGA TGCATGAA | 2993 |
| 3008 | AAUGAAAA A UACUUUAA | 666 | TTAAAGTA GGCTAGCTACAACGA TTTTCATT | 2994 |
| 3010 | UGAAAAAU A CUUUAAUU | 667 | AATTAAAG GGCTAGCTACAACGA ATTTTTCA | 2995 |
| 3016 | AUACUUUA A UUCAUGAA | 668 | TTCATGAA GGCTAGCTACAACGA TAAAGTAT | 2996 |
| 3020 | UUUAAUUC A UGAAGCUU | 669 | AAGCTTCA GGCTAGCTACAACGA GAATTAAA | 2997 |
| 3025 | UUCAUGAA G CUUACUUU | 670 | AAAGTAAG GGCTAGCTACAACGA TTCATGAA | 2998 |
| 3029 | UGAAGCUU A CUUUUUUU | 671 | AAAAAAAG GGCTAGCTACAACGA AAGCTTCA | 2999 |
| 3044 | UUUUUUUG G UGUCAGAG | 672 | CTCTGACA GGCTAGCTACAACGA CAAAAAAA | 3000 |
| 3046 | UUUUUGGU G UCAGAGUC | 673 | GACTCTGA GGCTAGCTACAACGA ACCAAAAA | 3001 |
| 3052 | GUGUCAGA G UCUCGCUC | 674 | GAGCGAGA GGCTAGCTACAACGA TCTGACAC | 3002 |
| 3057 | AGAGUCUC G CUCUUGUC | 675 | GACAAGAG GGCTAGCTACAACGA GAGACTCT | 3003 |
| 3063 | UCGCUCUU G UCACCCAG | 676 | CTGGGTGA GGCTAGCTACAACGA AAGAGCGA | 3004 |
| 3066 | CUCUUGUC A CCCAGGCU | 677 | AGCCTGGG GGCTAGCTACAACGA GACAAGAG | 3005 |
| 3072 | UCACCCAG G CUGGAAUG | 678 | CATTCCAG GGCTAGCTACAACGA CTGGGTGA | 3006 |
| 3078 | AGGCUGGA A UGCAGUGG | 679 | CCACTGCA GGCTAGCTACAACGA TCCAGCCT | 3007 |
| 3080 | GCUGGAAU G CAGUGGCG | 680 | CGCCACTG GGCTAGCTACAACGA ATTCCAGC | 3008 |
| 3083 | GGAAUGCA G UGGCGCCA | 681 | TGGCGCCA GGCTAGCTACAACGA TGCATTCC | 3009 |
| 3086 | AUGCAGUG G CGCCAUCU | 682 | AGATGGCG GGCTAGCTACAACGA CACTGCAT | 3010 |
| 3088 | GCAGUGGC G CCAUCUCA | 683 | TGAGATGG GGCTAGCTACAACGA GCCACTGC | 3011 |
| 3091 | GUGGCGCC A UCUCAGCU | 684 | AGCTGAGA GGCTAGCTACAACGA GGCGCCAC | 3012 |
| 3097 | CCAUCUCA G CUCACUGC | 685 | GCAGTGAG GGCTAGCTACAACGA TGAGATGG | 3013 |
| 3101 | CUCAGCUC A CUGCAACC | 686 | GGTTGCAG GGCTAGCTACAACGA GAGCTGAG | 3014 |
| 3104 | AGCUCACU G CAACCUUC | 687 | GAAGGTTG GGCTAGCTACAACGA AGTGAGCT | 3015 |
| 3107 | UCACUCCA A CCUUCCAU | 688 | ATGGAAGG GGCTAGCTACAACGA TGCAGTGA | 3016 |
| 3114 | AACCUUCC A UCUUCCCA | 689 | TGGGAAGA GGCTAGCTACAACGA GGAAGGTT | 3017 |
| 3124 | CUUCCCAG G UUCAAGCG | 690 | CGCTTGAA GGCTAGCTACAACGA CTGGGAAG | 3018 |
| 3130 | AGGUUCAA G CGAUUCUC | 691 | GAGAATCG GGCTAGCTACAACGA TTGAACCT | 3019 |
| 3133 | UUCAAGCG A UUCUCGUG | 692 | CACGAGAA GGCTAGCTACAACGA CGCTTGAA | 3020 |
| 3139 | CGAUUCUC G UGCCUCGG | 693 | CCGAGGCA GGCTAGCTACAACGA GAGAATCG | 3021 |
| 3141 | AUUCUCGU G CCUCGGCC | 694 | GGCCGAGG GGCTAGCTACAACGA ACGAGAAT | 3022 |
| 3147 | GUGCCUCG G CCUCCUGA | 695 | TCAGGAGG GGCTAGCTACAACGA CGAGGCAC | 3023 |
| 3156 | CCUCCUGA G UAGCUGGG | 696 | CCCAGCTA GGCTAGCTACAACGA TCAGGAGG | 3024 |
| 3159 | CCUGAGUA G CUGGGAUU | 697 | AATCCCAG GGCTAGCTACAACGA TACTCAGG | 3025 |
| 3165 | UAGCUGGG A UUACAGGC | 698 | GCCTGTAA GGCTAGCTACAACGA CCCAGCTA | 3026 |
| 3168 | CUGGGAUU A CAGGCGUG | 699 | CACGCCTG GGCTAGCTACAACGA AATCCCAG | 3027 |
| 3172 | GAUUACAG G CGUGUGCA | 700 | TGCACACG GGCTAGCTACAACGA CTGTAATC | 3028 |
| 3174 | UUACAGGC G UGUGCACU | 701 | AGTGCACA GGCTAGCTACAACGA GCCTGTAA | 3029 |
| 3176 | ACAGGCGU G UGCACUAC | 702 | GTAGTGCA GGCTAGCTACAACGA ACGCCTGT | 3030 |
| 3178 | AGGCGUGU G CACUACAC | 703 | GTGTAGTG GGCTAGCTACAACGA ACACGCCT | 3031 |
| 3180 | GCGUGUGC A CUACACUC | 704 | GAGTGTAG GGCTAGCTACAACGA GCACACGC | 3032 |
| 3183 | UGUGCACU A CACUCAAC | 705 | GTTGAGTG GGCTAGCTACAACGA AGTGCACA | 3033 |
| 3185 | UGCACUAC A CUCAACUA | 706 | TAGTTGAG GGCTAGCTACAACGA GTAGTGCA | 3034 |
| 3190 | UACACUCA A CUAAUUUU | 707 | AAAATTAG GGCTAGCTACAACGA TGAGTGTA | 3035 |
| 3194 | CUCAACUA A UUUUUGUA | 708 | TACAAAAA GGCTAGCTACAACGA TAGTTGAG | 3036 |
| 3200 | UAAUUUUU G UAUUUUUA | 709 | TAAAAATA GGCTAGCTACAACGA AAAAATTA | 3037 |
| 3202 | AUUUUUGU A UUUUUAGG | 710 | CCTAAAAA GGCTAGCTACAACGA ACAAAAAT | 3038 |
| 3215 | UAGGAGAG A CGGGGUUU | 711 | AAACCCCG GGCTAGCTACAACGA CTCTCCTA | 3039 |
| 3220 | GAGACGGG G UUUCACCU | 712 | AGGTGAAA GGCTAGCTACAACGA CCCGTCTC | 3040 |
| 3225 | GGGGUUUC A CCUGUUGG | 713 | CCAACAGG GGCTAGCTACAACGA GAAACCCC | 3041 |
| 3229 | UUUCACCU G UUGGCCAG | 714 | CTGGCCAA GGCTAGCTACAACGA AGGTGAAA | 3042 |
| 3233 | ACCUGUUG G CCAGGCUG | 715 | CAGCCTGG GGCTAGCTACAACGA CAACAGGT | 3043 |
| 3238 | UUGGCCAG G CUGGUCUC | 716 | GAGACCAG GGCTAGCTACAACGA CTGGCCAA | 3044 |
| 3242 | CCAGGCUG G UCUCGAAC | 717 | GTTCGAGA GGCTAGCTACAACGA CAGCCTGG | 3045 |
| 3249 | GGUCUCGA A CUCCUGAC | 718 | GTCAGGAG GGCTAGCTACAACGA TCGAGACC | 3046 |
| 3256 | AACUCCUG A CCUCAAGU | 719 | ACTTGAGG GGCTAGCTACAACGA CAGGAGTT | 3047 |
| 3263 | GACCUCAA G UGAUUCAC | 720 | GTGAATCA GGCTAGCTACAACGA TTGAGGTC | 3048 |
| 3266 | CUCAAGUG A UUCACCCA | 721 | TGGGTGAA GGCTAGCTACAACGA CACTTGAG | 3049 |
| 3270 | AGUGAUUC A CCCACCUU | 722 | AAGGTGGG GGCTAGCTACAACGA GAATCACT | 3050 |
| 3274 | AUUCACCC A CCUUGGCC | 723 | GGCCAAGG GGCTAGCTACAACGA GGGTGAAT | 3051 |
| 3280 | CCACCUUG G CCUCAUAA | 724 | TTATGAGG GGCTAGCTACAACGA CAAGGTGG | 3052 |
| 3285 | UUGGCCUC A UAAACCUG | 725 | CAGGTTTA GGCTAGCTACAACGA GAGGCCAA | 3053 |
| 3289 | CCUCAUAA A CCUGUUUU | 726 | AAAACAGG GGCTAGCTACAACGA TTATGAGG | 3054 |
| 3293 | AUAAACCU G UUUUGCAG | 727 | CTGCAAAA GGCTAGCTACAACGA AGGTTTAT | 3055 |
| 3298 | CCUGUUUU G CAGAACUC | 728 | GAGTTCTG GGCTAGCTACAACGA AAAACAGG | 3056 |
| 3303 | UUUGCAGA A CUCAUUUA | 729 | TAAATGAG GGCTAGCTACAACGA TCTGCAAA | 3057 |
| 3307 | CAGAACUC A UUUAUUCA | 730 | TGAATAAA GGCTAGCTACAACGA GAGTTCTG | 3058 |
| 3311 | ACUCAUUU A UUCAGCAA | 731 | TTGCTGAA GGCTAGCTACAACGA AAATGAGT | 3059 |
| 3316 | UUUAUUCA G CAAAUAUU | 732 | AATATTTG GGCTAGCTACAACGA TGAATAAA | 3060 |
| 3320 | UUCAGCAA A UAUUUAUU | 733 | AATAAATA GGCTAGCTACAACGA TTGCTGAA | 3061 |
| 3322 | CAGCAAAU A UUUAUUGA | 734 | TCAATAAA GGCTAGCTACAACGA ATTTGCTG | 3062 |
| 3326 | AAAUAUUU A UUGAGUGC | 735 | GCACTCAA GGCTAGCTACAACGA AAATATTT | 3063 |
| 3331 | UUUAUUGA G UGCCUACC | 736 | GGTAGGCA GGCTAGCTACAACGA TCAATAAA | 3064 |
| 3333 | UAUUGAGU G CCUACCAG | 737 | CTGGTAGG GGCTAGCTACAACGA ACTCAATA | 3065 |
| 3337 | GAGUGCCU A CCAGAUGC | 738 | GCATCTGG GGCTAGCTACAACGA AGGCACTC | 3066 |
| 3342 | CCUACCAG A UGCCAGUC | 739 | GACTGGCA GGCTAGCTACAACGA CTGGTAGG | 3067 |
| 3344 | UACCAGAU G CCAGUCAC | 740 | GTGACTGG GGCTAGCTACAACGA ATCTGGTA | 3068 |
| 3348 | AGAUGCCA G UCACCGCA | 741 | TGCGGTGA GGCTAGCTACAACGA TGGCATCT | 3069 |
| 3351 | UGCCAGUC A CCGCACAA | 742 | TTGTGCGG GGCTAGCTACAACGA GACTGGCA | 3070 |
| 3354 | CAGUCACC G CACAAGGC | 743 | GCCTTGTG GGCTAGCTACAACGA GGTGACTG | 3071 |
| 3356 | GUCACCGC A CAAGGCAC | 744 | GTGCCTTG GGCTAGCTACAACGA GCGGTGAC | 3072 |
| 3361 | CGCACAAG G CACUGGGU | 745 | ACCCAGTG GGCTAGCTACAACGA CTTGTGCG | 3073 |
| 3363 | CACAAGGC A CUGGGUAU | 746 | ATACCCAG GGCTAGCTACAACGA GCCTTGTG | 3074 |
| 3368 | GGCACUGG G UAUAUGGU | 747 | ACCATATA GGCTAGCTACAACGA CCAGTGCC | 3075 |
| 3370 | CACUGGGU A UAUGGUAU | 748 | ATACCATA GGCTAGCTACAACGA ACCCAGTG | 3076 |
| 3372 | CUGGGUAU A UGGUAUCC | 749 | GGATACCA GGCTAGCTACAACGA ATACCCAG | 3077 |
| 3375 | GGUAUAUG G UAUCCCCA | 750 | TGGGGATA GGCTAGCTACAACGA CATATACC | 3078 |
| 3377 | UAUAUGGU A UCCCCAAA | 751 | TTTGGGGA GGCTAGCTACAACGA ACCATATA | 3079 |
| 3385 | AUCCCCAA A CAAGAGAC | 752 | GTCTCTTG GGCTAGCTACAACGA TTGGGGAT | 3080 |
| 3392 | AACAAGAG A CAUAAUCC | 753 | GGATTATG GGCTAGCTACAACGA CTCTTGTT | 3081 |
| 3394 | CAAGAGAC A UAAUCCCG | 754 | CGGGATTA GGCTAGCTACAACGA GTCTCTTG | 3082 |
| 3397 | GAGACAUA A UCCCGGUC | 755 | GACCGGGA GGCTAGCTACAACGA TATGTCTC | 3083 |
| 3403 | UAAUCCCG G UCCUUAGG | 756 | CCTAAGGA GGCTAGCTACAACGA CGGGATTA | 3084 |
| 3411 | GUCCUUAG G UACUGCUA | 757 | TAGCAGTA GGCTAGCTACAACGA CTAAGGAC | 3085 |
| 3413 | CCUUAGGU A CUGCUAGU | 758 | ACTAGCAG GGCTAGCTACAACGA ACCTAAGG | 3086 |
| 3416 | UAGGUACU G CUAGUGUG | 759 | CACACTAG GGCTAGCTACAACGA AGTACCTA | 3087 |
| 3420 | UACUGCUA G UGUGGUCU | 760 | AGACCACA GGCTAGCTACAACGA TAGCAGTA | 3088 |
| 3422 | CUGCUAGU G UGGUCUGU | 761 | ACAGACCA GGCTAGCTACAACGA ACTAGCAG | 3089 |
| 3425 | CUAGUGUG G UCUGUAAU | 762 | ATTACAGA GGCTAGCTACAACGA CACACTAG | 3090 |
| 3429 | UGUGGUCU G UAAUAUCU | 763 | AGATATTA GGCTAGCTACAACGA AGACCACA | 3091 |
| 3432 | GGUCUGUA A UAUCUUAC | 764 | GTAAGATA GGCTAGCTACAACGA TACAGACC | 3092 |
| 3434 | UCUGUAAU A UCUUACUA | 765 | TAGTAAGA GGCTAGCTACAACGA ATTACAGA | 3093 |
| 3439 | AAUAUCUU A CUAAGGCC | 766 | GGCCTTAG GGCTAGCTACAACGA AAGATATT | 3094 |
| 3445 | UUACUAAG G CCUUUGGU | 767 | ACCAAAGG GGCTAGCTACAACGA CTTAGTAA | 3095 |
| 3452 | GGCCUUUG G UAUACGAC | 768 | GTCGTATA GGCTAGCTACAACGA CAAAGGCC | 3096 |
| 3454 | CCUUUGGU A UACGACCC | 769 | GGGTCGTA GGCTAGCTACAACGA ACCAAAGG | 3097 |
| 3456 | UUUGGUAU A CGACCCAG | 770 | CTGGGTCG GGCTAGCTACAACGA ATACCAAA | 3098 |
| 3459 | GGUAUACG A CCCAGAGA | 771 | TCTCTGGG GGCTAGCTACAACGA CGTATACC | 3099 |
| 3467 | ACCCAGAG A UAACACGA | 772 | TCGTGTTA GGCTAGCTACAACGA CTCTGGGT | 3100 |
| 3470 | CAGAGAUA A CACGAUGC | 773 | GCATCGTG GGCTAGCTACAACGA TATCTCTG | 3101 |
| 3472 | GAGAUAAC A CGAUGCGU | 774 | ACGCATCG GGCTAGCTACAACGA GTTATCTC | 3102 |
| 3475 | AUAACACG A UGCGUAUU | 775 | AATACGCA GGCTAGCTACAACGA CGTGTTAT | 3103 |
| 3477 | AACACGAU G CGUAUUUU | 776 | AAAATACG GGCTAGCTACAACGA ATCGTGTT | 3104 |
| 3479 | CACGAUGC G UAUUUUAG | 777 | CTAAAATA GGCTAGCTACAACGA GCATCGTG | 3105 |
| 3481 | CGAUGCGU A UUUUAGUU | 778 | AACTAAAA GGCTAGCTACAACGA ACGCATCG | 3106 |
| 3487 | GUAUUUUA G UUUUGCAA | 779 | TTGCAAAA GGCTAGCTACAACGA TAAAATAC | 3107 |
| 3492 | UUAGUUUU G CAAAGAAG | 780 | CTTCTTTG GGCTAGCTACAACGA AAAACTAA | 3108 |
| 3503 | AAGAAGGG G UUUGGUCU | 781 | AGACCAAA GGCTAGCTACAACGA CCCTTCTT | 3109 |
| 3508 | GGGGUUUG G UCUCUGUG | 782 | CACAGAGA GGCTAGCTACAACGA CAAACCCC | 3110 |
| 3514 | UGGUCUCU G UGCCAGCU | 783 | AGCTGGCA GGCTAGCTACAACGA AGAGACCA | 3111 |
| 3516 | GUCUCUGU G CCAGCUCU | 784 | AGAGCTGG GGCTAGCTACAACGA ACAGAGAC | 3112 |
| 3520 | CUGUGCCA G CUCUAUAA | 785 | TTATAGAG GGCTAGCTACAACGA TGGCACAG | 3113 |
| 3525 | CCAGCUCU A UAAUUGUU | 786 | AACAATTA GGCTAGCTACAACGA AGAGCTGG | 3114 |
| 3528 | GCUCUAUA A UUGUUUUG | 787 | CAAAACAA GGCTAGCTACAACGA TATAGAGC | 3115 |
| 3531 | CUAUAAUU G UUUUGCUA | 788 | TAGCAAAA GGCTAGCTACAACGA AATTATAG | 3116 |
| 3536 | AUUGUUUU G CUACGAUU | 789 | AATCGTAG GGCTAGCTACAACGA AAAACAAT | 3117 |
| 3539 | GUUUUGCU A CGAUUCCA | 790 | TGGAATCG GGCTAGCTACAACGA AGCAAAAC | 3118 |
| 3542 | UUGCUACG A UUCCACUG | 791 | CAGTGGAA GGCTAGCTACAACGA CGTAGCAA | 3119 |
| 3547 | ACGAUUCC A CUGAAACU | 792 | AGTTTCAG GGCTAGCTACAACGA GGAATCGT | 3120 |
| 3553 | CCACUGAA A CUCUUCGA | 793 | TCGAAGAG GGCTAGCTACAACGA TTCAGTGG | 3121 |
| 3561 | ACUCUUCG A UCAAGCUA | 794 | TAGCTTGA GGCTAGCTACAACGA CGAAGAGT | 3122 |
| 3566 | UCGAUCAA G CUACUUUA | 795 | TAAAGTAG GGCTAGCTACAACGA TTGATCGA | 3123 |
| 3569 | AUCAAGCU A CUUUAUGU | 796 | ACATAAAG GGCTAGCTACAACGA AGCTTGAT | 3124 |
| 3574 | GCUACUUU A UGUAAAUC | 797 | GATTTACA GGCTAGCTACAACGA AAAGTAGC | 3125 |
| 3576 | UACUUUAU G UAAAUCAC | 798 | GTGATTTA GGCTAGCTACAACGA ATAAAGTA | 3126 |
| 3580 | UUAUGUAA A UCACUUCA | 799 | TGAAGTGA GGCTAGCTACAACGA TTACATAA | 3127 |
| 3583 | UGUAAAUC A CUUCAUUG | 800 | CAATGAAG GGCTAGCTACAACGA GATTTACA | 3128 |
| 3588 | AUCACUUC A UUGUUUUA | 801 | TAAAACAA GGCTAGCTACAACGA GAAGTGAT | 3129 |
| 3591 | ACUUCAUU G UUUUAAAG | 802 | CTTTAAAA GGCTAGCTACAACGA AATGAAGT | 3130 |
| 3602 | UUAAAGGA A UAAACUUG | 803 | CAAGTTTA GGCTAGCTACAACGA TCCTTTAA | 3131 |
| 3606 | AGGAAUAA A CUUGAUUA | 804 | TAATCAAG GGCTAGCTACAACGA TTATTCCT | 3132 |
| 3611 | UAAACUUG A UUAUAUUG | 805 | CAATATAA GGCTAGCTACAACGA CAAGTTTA | 3133 |
| 3614 | ACUUGAUU A UAUUGUUU | 806 | AAACAATA GGCTAGCTACAACGA AATCAAGT | 3134 |
| 3616 | UUGAUUAU A UUGUUUUU | 807 | AAAAACAA GGCTAGCTACAACGA ATAATCAA | 3135 |
| 3619 | AUUAUAUU G UUUUUUUA | 808 | TAAAAAAA GGCTAGCTACAACGA AATATAAT | 3136 |
| 3627 | GUUUUUUU A UUUGGCAU | 809 | ATGCCAAA GGCTAGCTACAACGA AAAAAAAC | 3137 |
| 3632 | UUUAUUUG G CAUAACUG | 810 | CAGTTATG GGCTAGCTACAACGA CAAATAAA | 3138 |
| 3634 | UAUUUGGC A UAACUGUG | 811 | CACAGTTA GGCTAGCTACAACGA GCCAAATA | 3139 |
| 3637 | UUGGCAUA A CUGUGAUU | 812 | AATCACAG GGCTAGCTACAACGA TATGCCAA | 3140 |
| 3640 | GCAUAACU G UGAUUCUU | 813 | AAGAATCA GGCTAGCTACAACGA AGTTATGC | 3141 |
| 3643 | UAACUGUG A UUCUUUUA | 814 | TAAAAGAA GGCTAGCTACAACGA CACAGTTA | 3142 |
| 3654 | CUUUUAGG A CAAUUACU | 815 | AGTAATTG GGCTAGCTACAACGA CCTAAAAG | 3143 |
| 3657 | UUAGGACA A UUACUGUA | 816 | TACAGTAA GGCTAGCTACAACGA TGTCCTAA | 3144 |
| 3660 | GGACAAUU A CUGUACAC | 817 | GTGTACAG GGCTAGCTACAACGA AATTGTCC | 3145 |
| 3663 | CAAUUACU G UACACAUU | 818 | AATGTGTA GGCTAGCTACAACGA AGTAATTG | 3146 |
| 3665 | AUUACUGU A CACAUUAA | 819 | TTAATGTG GGCTAGCTACAACGA ACAGTAAT | 3147 |
| 3667 | UACUGUAC A CAUUAAGG | 820 | CCTTAATG GGCTAGCTACAACGA GTACAGTA | 3148 |
| 3669 | CUGUACAC A UUAAGGUG | 821 | CACCTTAA GGCTAGCTACAACGA GTGTACAG | 3149 |
| 3675 | ACAUUAAG G UGUAUGUC | 822 | GACATACA GGCTAGCTACAACGA CTTAATGT | 3150 |
| 3677 | AUUAAGGU G UAUGUCAG | 823 | CTGACATA GGCTAGCTACAACGA ACCTTAAT | 3151 |
| 3679 | UAAGGUGU A UGUCAGAU | 824 | ATCTGACA GGCTAGCTACAACGA ACACCTTA | 3152 |
| 3681 | AGGUGUAU G UCAGAUAU | 825 | ATATCTGA GGCTAGCTACAACGA ATACACCT | 3153 |
| 3686 | UAUGUCAG A UAUUCAUA | 826 | TATGAATA GGCTAGCTACAACGA CTGACATA | 3154 |
| 3688 | UGUCAGAU A UUCAUAUU | 827 | AATATGAA GGCTAGCTACAACGA ATCTGACA | 3155 |
| 3692 | AGAUAUUC A UAUUGACC | 828 | GGTCAATA GGCTAGCTACAACGA GAATATCT | 3156 |
| 3694 | AUAUUCAU A UUGACCCA | 829 | TGGGTCAA GGCTAGCTACAACGA ATGAATAT | 3157 |
| 3698 | UCAUAUUG A CCCAAAUG | 830 | CATTTGGG GGCTAGCTACAACGA CAATATGA | 3158 |
| 3704 | UGACCCAA A UGUGUAAU | 831 | ATTACACA GGCTAGCTACAACGA TTGGGTCA | 3159 |
| 3706 | ACCCAAAU G UGUAAUAU | 832 | ATATTACA GGCTAGCTACAACGA ATTTGGGT | 3160 |
| 3708 | CCAAAUGU G UAAUAUUC | 833 | GAATATTA GGCTAGCTACAACGA ACATTTGG | 3161 |
| 3711 | AAUGUGUA A UAUUCCAG | 834 | CTGGAATA GGCTAGCTACAACGA TACACATT | 3162 |
| 3713 | UGUGUAAU A UUCCAGUU | 835 | AACTGGAA GGCTAGCTACAACGA ATTACACA | 3163 |
| 3719 | AUAUUCCA G UUUUCUCU | 836 | AGAGAAAA GGCTAGCTACAACGA TGGAATAT | 3164 |
| 3728 | UUUUCUCU G CAUAAGUA | 837 | TACTTATG GGCTAGCTACAACGA AGAGAAAA | 3165 |
| 3730 | UUCUCUGC A UAAGUAAU | 838 | ATTACTTA GGCTAGCTACAACGA GCAGAGAA | 3166 |
| 3734 | CUGCAUAA G UAAUUAAA | 839 | TTTAATTA GGCTAGCTACAACGA TTATGCAG | 3167 |
| 3737 | CAUAAGUA A UUAAAAUA | 840 | TATTTTAA GGCTAGCTACAACGA TACTTATG | 3168 |
| 3743 | UAAUUAAA A UAUACUUA | 841 | TAAGTATA GGCTAGCTACAACGA TTTAATTA | 3169 |
| 3745 | AUUAAAAU A UACUUAAA | 842 | TTTAAGTA GGCTAGCTACAACGA ATTTTAAT | 3170 |
| 3747 | UAAAAUAU A CUUAAAAA | 843 | TTTTTAAG GGCTAGCTACAACGA ATATTTTA | 3171 |
| 3755 | ACUUAAAA A UUAAUAGU | 844 | ACTATTAA GGCTAGCTACAACGA TTTTAAGT | 3172 |
| 3759 | AAAAAUUA A UAGUUUUA | 845 | TAAAACTA GGCTAGCTACAACGA TAATTTTT | 3173 |
| 3762 | AAUUAAUA G UUUUAUCU | 846 | AGATAAAA GGCTAGCTACAACGA TATTAATT | 3174 |
| 3767 | AUAGUUUU A UCUGGGUA | 847 | TACCCAGA GGCTAGCTACAACGA AAAACTAT | 3175 |
| 3773 | UUAUCUGG G UACAAAUA | 848 | TATTTGTA GGCTAGCTACAACGA CCAGATAA | 3176 |
| 3775 | AUCUGGGU A CAAAUAAA | 849 | TTTATTTG GGCTAGCTACAACGA ACCCAGAT | 3177 |
| 3779 | GGGUACAA A UAAACAGU | 850 | ACTGTTTA GGCTAGCTACAACGA TTGTACCC | 3178 |
| 3783 | ACAAAUAA A CAGUGCCU | 851 | AGGCACTG GGCTAGCTACAACGA TTATTTGT | 3179 |
| 3786 | AAUAAACA G UGCCUGAA | 852 | TTCAGGCA GGCTAGCTACAACGA TGTTTATT | 3180 |
| 3788 | UAAACAGU G CCUGAACU | 853 | AGTTCAGG GGCTAGCTACAACGA ACTGTTTA | 3181 |
| 3794 | GUGCCUGA A CUAGUUCA | 854 | TGAACTAG GGCTAGCTACAACGA TCAGGCAC | 3182 |
| 3798 | CUGAACUA G UUCACAGA | 855 | TCTGTGAA GGCTAGCTACAACGA TAGTTCAG | 3183 |
| 3802 | ACUAGUUC A CAGACAAG | 856 | CTTGTCTG GGCTAGCTACAACGA GAACTAGT | 3184 |
| 3806 | GUUCACAG A CAAGGGAA | 857 | TTCCCTTG GGCTAGCTACAACGA CTGTGAAC | 3185 |
| 3815 | CAAGGGAA A CUUCUAUG | 858 | CATAGAAG GGCTAGCTACAACGA TTCCCTTG | 3186 |
| 3821 | AAACUUCU A UGUAAAAA | 859 | TTTTTACA GGCTAGCTACAACGA AGAAGTTT | 3187 |
| 3823 | ACUUCUAU G UAAAAAUC | 860 | GATTTTTA GGCTAGCTACAACGA ATAGAAGT | 3188 |
| 3829 | AUGUAAAA A UCACUAUG | 861 | CATAGTGA GGCTAGCTACAACGA TTTTACAT | 3189 |
| 3832 | UAAAAAUC A CUAUGAUU | 862 | AATCATAG GGCTAGCTACAACGA GATTTTTA | 3190 |
| 3835 | AAAUCACU A UGAUUUCU | 863 | AGAAATCA GGCTAGCTACAACGA AGTGATTT | 3191 |
| 3838 | UCACUAUG A UUUCUGAA | 864 | TTCAGAAA GGCTAGCTACAACGA CATAGTGA | 3192 |
| 3846 | AUUUCUGA A UUGCUAUG | 865 | CATAGCAA GGCTAGCTACAACGA TCAGAAAT | 3193 |
| 3849 | UCUGAAUU G CUAUGUGA | 866 | TCACATAG GGCTAGCTACAACGA AATTCAGA | 3194 |
| 3852 | GAAUUGCU A UGUGAAAC | 867 | GTTTCACA GGCTAGCTACAACGA AGCAATTC | 3195 |
| 3854 | AUUGCUAU G UGAAACUA | 868 | TAGTTTCA GGCTAGCTACAACGA ATAGCAAT | 3196 |
| 3859 | UAUGUGAA A CUACAGAU | 869 | ATCTGTAG GGCTAGCTACAACGA TTCACATA | 3197 |
| 3862 | GUGAAACU A CAGAUCUU | 870 | AAGATCTG GGCTAGCTACAACGA AGTTTCAC | 3198 |
| 3866 | AACUACAG A UCUUUGGA | 871 | TCCAAAGA GGCTAGCTACAACGA CTGTAGTT | 3199 |
| 3875 | UCUUUGGA A CACUGUUU | 872 | AAACAGTG GGCTAGCTACAACGA TCCAAAGA | 3200 |
| 3877 | UUUGGAAC A CUGUUUAG | 873 | CTAAACAG GGCTAGCTACAACGA GTTCCAAA | 3201 |
| 3880 | GGAACACU G UUUAGGUA | 874 | TACCTAAA GGCTAGCTACAACGA AGTGTTCC | 3202 |
| 3886 | CUGUUUAG G UAGGGUGU | 875 | ACACCCTA GGCTAGCTACAACGA CTAAACAG | 3203 |
| 3891 | UAGGUAGG G UGUUAAGA | 876 | TCTTAACA GGCTAGCTACAACGA CCTACCTA | 3204 |
| 3893 | GGUAGGGU G UUAAGACU | 877 | AGTCTTAA GGCTAGCTACAACGA ACCCTACC | 3205 |
| 3899 | GUGUUAAG A CUUGACAC | 878 | GTGTCAAG GGCTAGCTACAACGA CTTAACAC | 3206 |
| 3904 | AAGACUUG A CACAGUAC | 879 | GTACTGTG GGCTAGCTACAACGA CAAGTCTT | 3207 |
| 3906 | GACUUGAC A CAGUACCU | 880 | AGGTACTG GGCTAGCTACAACGA GTCAAGTC | 3208 |
| 3909 | UUGACACA G UACCUCGU | 881 | ACGAGGTA GGCTAGCTACAACGA TGTGTCAA | 3209 |
| 3911 | GACACAGU A CCUCGUUU | 882 | AAACGAGG GGCTAGCTACAACGA ACTGTGTC | 3210 |
| 3916 | AGUACCUC G UUUCUACA | 883 | TGTAGAAA GGCTAGCTACAACGA GAGGTACT | 3211 |
| 3922 | UCGUUUCU A CACAGAGA | 884 | TCTCTGTG GGCTAGCTACAACGA AGAAACGA | 3212 |
| 3924 | GUUUCUAC A CAGAGAAA | 885 | TTTCTCTG GGCTAGCTACAACGA GTAGAAAC | 3213 |
| 3936 | AGAAAGAA A UGGCCAUA | 886 | TATGGCCA GGCTAGCTACAACGA TTCTTTCT | 3214 |
| 3939 | AAGAAAUG G CCAUACUU | 887 | AAGTATGG GGCTAGCTACAACGA CATTTCTT | 3215 |
| 3942 | AAAUGGCC A UACUUCAG | 888 | CTGAAGTA GGCTAGCTACAACGA GGCCATTT | 3216 |
| 3944 | AUGGCCAU A CUUCAGGA | 889 | TCCTGAAG GGCTAGCTACAACGA ATGGCCAT | 3217 |
| 3953 | CUUCAGGA A CUGCAGUG | 890 | CACTGCAG GGCTAGCTACAACGA TCCTGAAG | 3218 |
| 3956 | CAGGAACU G CAGUGCUU | 891 | AAGCACTG GGCTAGCTACAACGA AGTTCCTG | 3219 |
| 3959 | GAACUGCA G UGCUUAUG | 892 | CATAAGCA GGCTAGCTACAACGA TGCAGTTC | 3220 |
| 3961 | ACUGCAGU G CUUAUGAG | 893 | CTCATAAG GGCTAGCTACAACGA ACTGCAGT | 3221 |
| 3965 | CAGUGCUU A UGAGGGGA | 894 | TCCCCTCA GGCTAGCTACAACGA AAGCACTG | 3222 |
| 3973 | AUGAGGGG A UAUUUAGG | 895 | CCTAAATA GGCTAGCTACAACGA CCCCTCAT | 3223 |
| 3975 | GAGGGGAU A UUUAGGCC | 896 | GGCCTAAA GGCTAGCTACAACGA ATCCCCTC | 3224 |
| 3981 | AUAUUUAG G CCUCUUGA | 897 | TCAAGAGG GGCTAGCTACAACGA CTAAATAT | 3225 |
| 3990 | CCUCUUGA A UUUUUGAU | 898 | ATCAAAAA GGCTAGCTACAACGA TCAAGAGG | 3226 |
| 3997 | AAUUUUUG A UGUAGAUG | 899 | CATCTACA GGCTAGCTACAACGA CAAAAATT | 3227 |
| 3999 | UUUUUGAU G UAGAUGGG | 900 | CCCATCTA GGCTAGCTACAACGA ATCAAAAA | 3228 |
| 4003 | UGAUGUAG A UGGGCAUU | 901 | AATGCCCA GGCTAGCTACAACGA CTACATCA | 3229 |
| 4007 | GUAGAUGG G CAUUUUUU | 902 | AAAAAATG GGCTAGCTACAACGA CCATCTAC | 3230 |
| 4009 | AGAUGGGC A UUUUUUUA | 903 | TAAAAAAA GGCTAGCTACAACGA GCCCATCT | 3231 |
| 4020 | UUUUUAAG G UAGUGGUU | 904 | AACCACTA GGCTAGCTACAACGA CTTAAAAA | 3232 |
| 4023 | UUAAGGUA G UGGUUAAU | 905 | ATTAACCA GGCTAGCTACAACGA TACCTTAA | 3233 |
| 4026 | AGGUAGUG G UUAAUUAC | 906 | GTAATTAA GGCTAGCTACAACGA CACTACCT | 3234 |
| 4030 | AGUGGUUA A UUACCUUU | 907 | AAAGGTAA GGCTAGCTACAACGA TAACCACT | 3235 |
| 4033 | GGUUAAUU A CCUUUAUG | 908 | CATAAAGG GGCTAGCTACAACGA AATTAACC | 3236 |
| 4039 | UUACCUUU A UGUGAACU | 909 | AGTTCACA GGCTAGCTACAACGA AAAGGTAA | 3237 |
| 4041 | ACCUUUAU G UGAACUUU | 910 | AAAGTTCA GGCTAGCTACAACGA ATAAAGGT | 3238 |
| 4045 | UUAUGUGA A CUUUGAAU | 911 | ATTCAAAG GGCTAGCTACAACGA TCACATAA | 3239 |
| 4052 | AACUUUGA A UGGUUUAA | 912 | TTAAACCA GGCTAGCTACAACGA TCAAAGTT | 3240 |
| 4055 | UUUGAAUG G UUUAACAA | 913 | TTGTTAAA GGCTAGCTACAACGA CATTCAAA | 3241 |
| 4060 | AUGGUUUA A CAAAAGAU | 914 | ATCTTTTG GGCTAGCTACAACGA TAAACCAT | 3242 |
| 4067 | AACAAAAG A UUUGUUUU | 915 | AAAACAAA GGCTAGCTACAACGA CTTTTGTT | 3243 |
| 4071 | AAAGAUUU G UUUUUGUA | 916 | TACAAAAA GGCTAGCTACAACGA AAATCTTT | 3244 |
| 4077 | UUGUUUUU G UAGAGAUU | 917 | AATCTCTA GGCTAGCTACAACGA AAAAACAA | 3245 |
| 4083 | UUGUAGAG A UUUUAAAG | 918 | CTTTAAAA GGCTAGCTACAACGA CTCTACAA | 3246 |
| 4099 | GGGGGAGA A UUCUAGAA | 919 | TTCTAGAA GGCTAGCTACAACGA TCTCCCCC | 3247 |
| 4108 | UUCUAGAA A UAAAUGUU | 920 | AACATTTA GGCTAGCTACAACGA TTCTAGAA | 3248 |
| 4112 | AGAAAUAA A UGUUACCU | 921 | AGGTAACA GGCTAGCTACAACGA TTATTTCT | 3249 |
| 4114 | AAAUAAAU G UUACCUAA | 922 | TTAGGTAA GGCTAGCTACAACGA ATTTATTT | 3250 |
| 4117 | UAAAUGUU A CCUAAUUA | 923 | TAATTAGG GGCTAGCTACAACGA AACATTTA | 3251 |
| 4122 | GUUACCUA A UUAUUACA | 924 | TGTAATAA GGCTAGCTACAACGA TAGGTAAC | 3252 |
| 4125 | ACCUAAUU A UUACAGCC | 925 | GGCTGTAA GGCTAGCTACAACGA AATTAGGT | 3253 |
| 4128 | UAAUUAUU A CAGCCUUA | 926 | TAAGGCTG GGCTAGCTACAACGA AATAATTA | 3254 |
| 4131 | UUAUUACA G CCUUAAAG | 927 | CTTTAAGG GGCTAGCTACAACGA TGTAATAA | 3255 |
| 4140 | CCUUAAAG A CAAAAAUC | 928 | GATTTTTG GGCTAGCTACAACGA CTTTAAGG | 3256 |
| 4146 | AGACAAAA A UCCUUGUU | 929 | AACAAGGA GGCTAGCTACAACGA TTTTGTCT | 3257 |
| 4152 | AAAUCCUU G UUGAAGUU | 930 | AACTTCAA GGCTAGCTACAACGA AAGGATTT | 3258 |
| 4158 | UUGUUGAA G UUUUUUUA | 931 | TAAAAAAA GGCTAGCTACAACGA TTCAACAA | 3259 |
| 4174 | AAAAAAAG A CUAAAUUA | 932 | TAATTTAG GGCTAGCTACAACGA CTTTTTTT | 3260 |
| 4179 | AAGACUAA A UUACAUAG | 933 | CTATGTAA GGCTAGCTACAACGA TTAGTCTT | 3261 |
| 4182 | ACUAAAUU A CAUAGACU | 934 | AGTCTATG GGCTAGCTACAACGA AATTTAGT | 3262 |
| 4184 | UAAAUUAC A UAGACUUA | 935 | TAAGTCTA GGCTAGCTACAACGA GTAATTTA | 3263 |
| 4188 | UUACAUAG A CUUAGGCA | 936 | TGCCTAAG GGCTAGCTACAACGA CTATGTAA | 3264 |
| 4194 | AGACUUAG G CAUUAACA | 937 | TGTTAATG GGCTAGCTACAACGA CTAAGTCT | 3265 |
| 4196 | ACUUAGGC A UUAACAUG | 938 | CATGTTAA GGCTAGCTACAACGA GCCTAAGT | 3266 |
| 4200 | AGGCAUUA A CAUGUUUG | 939 | CAAACATG GGCTAGCTACAACGA TAATGCCT | 3267 |
| 4202 | GCAUUAAC A UGUUUGUG | 940 | CACAAACA GGCTAGCTACAACGA GTTAATGC | 3268 |
| 4204 | AUUAACAU G UUUGUGGA | 941 | TCCACAAA GGCTAGCTACAACGA ATGTTAAT | 3269 |
| 4208 | ACAUGUUU G UGGAAGAA | 942 | TTCTTCCA GGCTAGCTACAACGA AAACATGT | 3270 |
| 4216 | GUGGAAGA A UAUAGCAG | 943 | CTGCTATA GGCTAGCTACAACGA TCTTCCAC | 3271 |
| 4218 | GGAAGAAU A UAGCAGAC | 944 | GTCTGCTA GGCTAGCTACAACGA ATTCTTCC | 3272 |
| 4221 | AGAAUAUA G CAGACGUA | 945 | TACGTCTG GGCTAGCTACAACGA TATATTCT | 3273 |
| 4225 | UAUAGCAG A CGUAUAUU | 946 | AATATACG GGCTAGCTACAACGA CTGCTATA | 3274 |
| 4227 | UAGCAGAC G UAUAUUGU | 947 | ACAATATA GGCTAGCTACAACGA GTCTGCTA | 3275 |
| 4229 | GCAGACGU A UAUUGUAU | 948 | ATACAATA GGCTAGCTACAACGA ACGTCTGC | 3276 |
| 4231 | AGACGUAU A UUGUAUCA | 949 | TGATACAA GGCTAGCTACAACGA ATACGTCT | 3277 |
| 4234 | CGUAUAUU G UAUCAUUU | 950 | AAATGATA GGCTAGCTACAACGA AATATACG | 3278 |
| 4236 | UAUAUUGU A UCAUUUGA | 951 | TCAAATGA GGCTAGCTACAACGA ACAATATA | 3279 |
| 4239 | AUUGUAUC A UUUGAGUG | 952 | CACTCAAA GGCTAGCTACAACGA GATACAAT | 3280 |
| 4245 | UCAUUUGA G UGAAUGUU | 953 | AACATTCA GGCTAGCTACAACGA TCAAATGA | 3281 |
| 4249 | UUGAGUGA A UGUUCCCA | 954 | TGGGAACA GGCTAGCTACAACGA TCACTCAA | 3282 |
| 4251 | GAGUGAAU G UUCCCAAG | 955 | CTTGGGAA GGCTAGCTACAACGA ATTCACTC | 3283 |
| 4259 | GUUCCCAA G UAGGCAUU | 956 | AATGCCTA GGCTAGCTACAACGA TTGGGAAC | 3284 |
| 4263 | CCAAGUAG G CAUUCUAG | 957 | CTAGAATG GGCTAGCTACAACGA CTACTTGG | 3285 |
| 4265 | AAGUAGGC A UUCUAGGC | 958 | GCCTAGAA GGCTAGCTACAACGA GCCTACTT | 3286 |
| 4272 | CAUUCUAG G CUCUAUUU | 959 | AAATAGAG GGCTAGCTACAACGA CTAGAATG | 3287 |
| 4277 | UAGGCUCU A UUUAACUG | 960 | CAGTTAAA GGCTAGCTACAACGA AGAGCCTA | 3288 |
| 4282 | UCUAUUUA A CUGAGUCA | 961 | TGACTCAG GGCTAGCTACAACGA TAAATAGA | 3289 |
| 4287 | UUAACUGA G UCACACUG | 962 | CAGTGTGA GGCTAGCTACAACGA TCAGTTAA | 3290 |
| 4290 | ACUGAGUC A CACUGCAU | 963 | ATGCAGTG GGCTAGCTACAACGA GACTCAGT | 3291 |
| 4292 | UGAGUCAC A CUGCAUAG | 964 | CTATGCAG GGCTAGCTACAACGA GTGACTCA | 3292 |
| 4295 | GUCACACU G CAUAGGAA | 965 | TTCCTATG GGCTAGCTACAACGA AGTGTGAC | 3293 |
| 4297 | CACACUGC A UAGGAAUU | 966 | AATTCCTA GGCTAGCTACAACGA GCAGTGTG | 3294 |
| 4303 | GCAUAGGA A UUUAGAAC | 967 | GTTCTAAA GGCTAGCTACAACGA TCCTATGC | 3295 |
| 4310 | AAUUUAGA A CCUAACUU | 968 | AAGTTAGG GGCTAGCTACAACGA TCTAAATT | 3296 |
| 4315 | AGAACCUA A CUUUUAUA | 969 | TATAAAAG GGCTAGCTACAACGA TAGGTTCT | 3297 |
| 4321 | UAACUUUU A UAGGUUAU | 970 | ATAACCTA GGCTAGCTACAACGA AAAAGTTA | 3298 |
| 4325 | UUUUAUAG G UUAUCAAA | 971 | TTTGATAA GGCTAGCTACAACGA CTATAAAA | 3299 |
| 4328 | UAUAGGUU A UCAAAACU | 972 | AGTTTTGA GGCTAGCTACAACGA AACCTATA | 3300 |
| 4334 | UUAUCAAA A CUGUUGUC | 973 | GACAACAG GGCTAGCTACAACGA TTTGATAA | 3301 |
| 4337 | UCAAAACU G UUGUCACC | 974 | GGTGACAA GGCTAGCTACAACGA AGTTTTGA | 3302 |
| 4340 | AAACUGUU G UCACCAUU | 975 | AATGGTGA GGCTAGCTACAACGA AACAGTTT | 3303 |
| 4343 | CUGUUGUC A CCAUUGCA | 976 | TGCAATGG GGCTAGCTACAACGA GACAACAG | 3304 |
| 4346 | UUGUCACC A UUGCACAA | 977 | TTGTGCAA GGCTAGCTACAACGA GGTGACAA | 3305 |
| 4349 | UCACCAUU G CACAAUUU | 978 | AAATTGTG GGCTAGCTACAACGA AATGGTGA | 3306 |
| 4351 | ACCAUUGC A CAAUUUUG | 979 | CAAAATTG GGCTAGCTACAACGA GCAATGGT | 3307 |
| 4354 | AUUGCACA A UUUUGUCC | 980 | GGACAAAA GGCTAGCTACAACGA TGTGCAAT | 3308 |
| 4359 | ACAAUUUU G UCCUAAUA | 981 | TATTAGGA GGCTAGCTACAACGA AAAATTGT | 3309 |
| 4365 | UUGUCCUA A UAUAUACA | 982 | TGTATATA GGCTAGCTACAACGA TAGGACAA | 3310 |
| 4367 | GUCCUAAU A UAUACAUA | 983 | TATGTATA GGCTAGCTACAACGA ATTAGGAC | 3311 |
| 4369 | CCUAAUAU A UACAUAGA | 984 | TCTATGTA GGCTAGCTACAACGA ATATTAGG | 3312 |
| 4371 | UAAUAUAU A CAUAGAAA | 985 | TTTCTATG GGCTAGCTACAACGA ATATATTA | 3313 |
| 4373 | AUAUAUAC A UAGAAACU | 986 | AGTTTCTA GGCTAGCTACAACGA GTATATAT | 3314 |
| 4379 | ACAUAGAA A CUUUGUGG | 987 | CCACAAAG GGCTAGCTACAACGA TTCTATGT | 3315 |
| 4384 | GAAACUUU G UGGGGCAU | 988 | ATGCCCCA GGCTAGCTACAACGA AAAGTTTC | 3316 |
| 4389 | UUUGUGGG G CAUGUUAA | 989 | TTAACATG GGCTAGCTACAACGA CCCACAAA | 3317 |
| 4391 | UGUGGGGC A UGUUAAGU | 990 | ACTTAACA GGCTAGCTACAACGA GCCCCACA | 3318 |
| 4393 | UGGGGCAU G UUAAGUUA | 991 | TAACTTAA GGCTAGCTACAACGA ATGCCCCA | 3319 |
| 4398 | CAUGUUAA G UUACAGUU | 992 | AACTGTAA GGCTAGCTACAACGA TTAACATG | 3320 |
| 4401 | GUUAAGUU A CAGUUUGC | 993 | GCAAACTG GGCTAGCTACAACGA AACTTAAC | 3321 |
| 4404 | AAGUUACA G UUUGCACA | 994 | TGTGCAAA GGCTAGCTACAACGA TGTAACTT | 3322 |
| 4408 | UACAGUUU G CACAAGUU | 995 | AACTTGTG GGCTAGCTACAACGA AAACTGTA | 3323 |
| 4410 | CAGUUUGC A CAAGUUCA | 996 | TGAACTTG GGCTAGCTACAACGA GCAAACTG | 3324 |
| 4414 | UUGCACAA G UUCAUCUC | 997 | GAGATGAA GGCTAGCTACAACGA TTGTGCAA | 3325 |
| 4418 | ACAAGUUC A UCUCAUUU | 998 | AAATGAGA GGCTAGCTACAACGA GAACTTGT | 3326 |
| 4423 | UUCAUCUC A UUUGUAUU | 999 | AATACAAA GGCTAGCTACAACGA GAGATGAA | 3327 |
| 4427 | UCUCAUUU G UAUUCCAU | 1000 | ATGGAATA GGCTAGCTACAACGA AAATGAGA | 3328 |
| 4429 | UCAUUUGU A UUCCAUUG | 1001 | CAATGGAA GGCTAGCTACAACGA ACAAATGA | 3329 |
| 4434 | UGUAUUCC A UUGAUUUU | 1002 | AAAATCAA GGCTAGCTACAACGA GGAATACA | 3330 |
| 4438 | UUCCAUUG A UUUUUUUU | 1003 | AAAAAAAA GGCTAGCTACAACGA CAATGGAA | 3331 |
| 4457 | UCUUCUAA A CAUUUUUU | 1004 | AAAAAATG GGCTAGCTACAACGA TTAGAAGA | 3332 |
| 4459 | UUCUAAAC A UUUUUUCU | 1005 | AGAAAAAA GGCTAGCTACAACGA GTTTAGAA | 3333 |
| 4473 | UCUUCAAA A CAGUAUAU | 1006 | ATATACTG GGCTAGCTACAACGA TTTGAAGA | 3334 |
| 4476 | UCAAAACA G UAUAUAUA | 1007 | TATATATA GGCTAGCTACAACGA TGTTTTGA | 3335 |
| 4478 | AAAACAGU A UAUAUAAC | 1008 | GTTATATA GGCTAGCTACAACGA ACTGTTTT | 3336 |
| 4480 | AACAGUAU A UAUAACUU | 1009 | AAGTTATA GGCTAGCTACAACGA ATACTGTT | 3337 |
| 4482 | CAGUAUAU A UAACUUUU | 1010 | AAAAGTTA GGCTAGCTACAACGA ATATACTG | 3338 |
| 4485 | UAUAUAUA A CUUUUUUU | 1011 | AAAAAAAG GGCTAGCTACAACGA TATATATA | 3339 |
| 4499 | UUUAGGGG A UUUUUUUU | 1012 | AAAAAAAA GGCTAGCTACAACGA CCCCTAAA | 3340 |
| 4510 | UUUUUUAG A CAGCAAAA | 1013 | TTTTGCTG GGCTAGCTACAACGA CTAAAAAA | 3341 |
| 4513 | UUUAGACA G CAAAAAAC | 1014 | GTTTTTTG GGCTAGCTACAACGA TGTCTAAA | 3342 |
| 4520 | AGCAAAAA A CUAUCUGA | 1015 | TCAGATAG GGCTAGCTACAACGA TTTTTGCT | 3343 |
| 4523 | AAAAAACU A UCUGAAGA | 1016 | TCTTCAGA GGCTAGCTACAACGA AGTTTTTT | 3344 |
| 4531 | AUCUGAAG A UUUCCAUU | 1017 | AATGGAAA GGCTAGCTACAACGA CTTCAGAT | 3345 |
| 4537 | AGAUUUCC A UUUGUCAA | 1018 | TTGACAAA GGCTAGCTACAACGA GGAAATCT | 3346 |
| 4541 | UUCCAUUU G UCAAAAAG | 1019 | CTTTTTGA GGCTAGCTACAACGA AAATGGAA | 3347 |
| 4549 | GUCAAAAA G UAAUGAUU | 1020 | AATCATTA GGCTAGCTACAACGA TTTTTGAC | 3348 |
| 4552 | AAAAAGUA A UGAUUUCU | 1021 | AGAAATCA GGCTAGCTACAACGA TACTTTTT | 3349 |
| 4555 | AAGUAAUG A UUUCUUGA | 1022 | TCAAGAAA GGCTAGCTACAACGA CATTACTT | 3350 |
| 4563 | AUUUCUUG A UAAUUGUG | 1023 | CACAATTA GGCTAGCTACAACGA CAAGAAAT | 3351 |
| 4566 | UCUUGAUA A UUGUGUAG | 1024 | CTACACAA GGCTAGCTACAACGA TATCAAGA | 3352 |
| 4569 | UGAUAAUU G UGUAGUGA | 1025 | TCACTACA GGCTAGCTACAACGA AATTATCA | 3353 |
| 4571 | AUAAUUGU G UAGUGAAU | 1026 | ATTCACTA GGCTAGCTACAACGA ACAATTAT | 3354 |
| 4574 | AUUGUGUA G UGAAUGUU | 1027 | AACATTCA GGCTAGCTACAACGA TACACAAT | 3355 |
| 4578 | UGUAGUGA A UGUUUUUU | 1028 | AAAAAACA GGCTAGCTACAACGA TCACTACA | 3356 |
| 4580 | UAGUGAAU G UUUUUUAG | 1029 | CTAAAAAA GGCTAGCTACAACGA ATTCACTA | 3357 |
| 4590 | UUUUUAGA A CCCAGCAG | 1030 | CTGCTGGG GGCTAGCTACAACGA TCTAAAAA | 3358 |
| 4595 | AGAACCCA G CAGUUACC | 1031 | GGTAACTG GGCTAGCTACAACGA TGGGTTCT | 3359 |
| 4598 | ACCCAGCA G UUACCUUG | 1032 | CAAGGTAA GGCTAGCTACAACGA TGCTGGGT | 3360 |
| 4601 | CAGCAGUU A CCUUGAAA | 1033 | TTTCAAGG GGCTAGCTACAACGA AACTGCTG | 3361 |
| 4610 | CCUUGAAA G CUGAAUUU | 1034 | AAATTCAG GGCTAGCTACAACGA TTTCAAGG | 3362 |
| 4615 | AAAGCUGA A UUUAUAUU | 1035 | AATATAAA GGCTAGCTACAACGA TCAGCTTT | 3363 |
| 4619 | CUGAAUUU A UAUUUAGU | 1036 | ACTAAATA GGCTAGCTACAACGA AAATTCAG | 3364 |
| 4621 | GAAUUUAU A UUUAGUAA | 1037 | TTACTAAA GGCTAGCTACAACGA ATAAATTC | 3365 |
| 4626 | UAUAUUUA G UAACUUCU | 1038 | AGAAGTTA GGCTAGCTACAACGA TAAATATA | 3366 |
| 4629 | AUUUAGUA A CUUCUGUG | 1039 | CACAGAAG GGCTAGCTACAACGA TACTAAAT | 3367 |
| 4635 | UAACUUCU G UGUUAAUA | 1040 | TATTAACA GGCTAGCTACAACGA AGAAGTTA | 3368 |
| 4637 | ACUUCUGU G UUAAUACU | 1041 | AGTATTAA GGCTAGCTACAACGA ACAGAAGT | 3369 |
| 4641 | CUGUGUUA A UACUGGAU | 1042 | ATCCAGTA GGCTAGCTACAACGA TAACACAG | 3370 |
| 4643 | GUGUUAAU A CUGGAUAG | 1043 | CTATCCAG GGCTAGCTACAACGA ATTAACAC | 3371 |
| 4648 | AAUACUGG A UAGCAUGA | 1044 | TCATGCTA GGCTAGCTACAACGA CCAGTATT | 3372 |
| 4651 | ACUGGAUA G CAUGAAUU | 1045 | AATTCATG GGCTAGCTACAACGA TATCCAGT | 3373 |
| 4653 | UGGAUAGC A UGAAUUCU | 1046 | AGAATTCA GGCTAGCTACAACGA GCTATCCA | 3374 |
| 4657 | UAGCAUGA A UUCUGCAU | 1047 | ATGCAGAA GGCTAGCTACAACGA TCATGCTA | 3375 |
| 4662 | UGAAUUCU G CAUUGAGA | 1048 | TCTCAATG GGCTAGCTACAACGA AGAATTCA | 3376 |
| 4664 | AAUUCUGC A UUGAGAAA | 1049 | TTTCTCAA GGCTAGCTACAACGA GCAGAATT | 3377 |
| 4672 | AUUGAGAA A CUGAAUAG | 1050 | CTATTCAG GGCTAGCTACAACGA TTCTCAAT | 3378 |
| 4677 | GAAACUGA A UAGCUGUC | 1051 | GACAGCTA GGCTAGCTACAACGA TCAGTTTC | 3379 |
| 4680 | ACUGAAUA G CUGUCAUA | 1052 | TATGACAG GGCTAGCTACAACGA TATTCAGT | 3380 |
| 4683 | GAAUAGCU G UCAUAAAA | 1053 | TTTTATGA GGCTAGCTACAACGA AGCTATTC | 3381 |
| 4686 | UAGCUGUC A UAAAAUGC | 1054 | GCATTTTA GGCTAGCTACAACGA GACAGCTA | 3382 |
| 4691 | GUCAUAAA A UGCUUUCU | 1055 | AGAAAGCA GGCTAGCTACAACGA TTTATGAC | 3383 |
| 4693 | CAUAAAAU G CUUUCUUU | 1056 | AAAGAAAG GGCTAGCTACAACGA ATTTTATG | 3384 |
| 4713 | AAAGAAAG A UACUCACA | 1057 | TGTGAGTA GGCTAGCTACAACGA CTTTCTTT | 3385 |
| 4715 | AGAAAGAU A CUCACAUG | 1058 | CATGTGAG GGCTAGCTACAACGA ATCTTTCT | 3386 |
| 4719 | AGAUACUC A CAUGAGUU | 1059 | AACTCATG GGCTAGCTACAACGA GAGTATCT | 3387 |
| 4721 | AUACUCAC A UGAGUUCU | 1060 | AGAACTCA GGCTAGCTACAACGA GTGAGTAT | 3388 |
| 4725 | UCACAUGA G UUCUUGAA | 1061 | TTCAAGAA GGCTAGCTACAACGA TCATGTGA | 3389 |
| 4736 | CUUGAAGA A UAGUCAUA | 1062 | TATGACTA GGCTAGCTACAACGA TCTTCAAG | 3390 |
| 4739 | GAAGAAUA G UCAUAACU | 1063 | AGTTATGA GGCTAGCTACAACGA TATTCTTC | 3391 |
| 4742 | GAAUAGUC A UAACUAGA | 1064 | TCTAGTTA GGCTAGCTACAACGA GACTATTC | 3392 |
| 4745 | UAGUCAUA A CUAGAUUA | 1065 | TAATCTAG GGCTAGCTACAACGA TATGACTA | 3393 |
| 4750 | AUAACUAG A UUAAGAUC | 1066 | GATCTTAA GGCTAGCTACAACGA CTAGTTAT | 3394 |
| 4756 | AGAUUAAG A UCUGUGUU | 1067 | AACACAGA GGCTAGCTACAACGA CTTAATCT | 3395 |
| 4760 | UAAGAUCU G UGUUUUAG | 1068 | CTAAAACA GGCTAGCTACAACGA AGATCTTA | 3396 |
| 4762 | AGAUCUGU G UUUUAGUU | 1069 | AACTAAAA GGCTAGCTACAACGA ACAGATCT | 3397 |
| 4768 | GUGUUUUA G UUUAAUAG | 1070 | CTATTAAA GGCTAGCTACAACGA TAAAACAC | 3398 |
| 4773 | UUAGUUUA A UAGUUUGA | 1071 | TCAAACTA GGCTAGCTACAACGA TAAACTAA | 3399 |
| 4776 | GUUUAAUA G UUUGAAGU | 1072 | ACTTCAAA GGCTAGCTACAACGA TATTAAAC | 3400 |
| 4783 | AGUUUGAA G UGCCUGUU | 1073 | AACAGGCA GGCTAGCTACAACGA TTCAAACT | 3401 |
| 4785 | UUUGAAGU G CCUGUUUG | 1074 | CAAACAGG GGCTAGCTACAACGA ACTTCAAA | 3402 |
| 4789 | AAGUGCCU G UUUGGGAU | 1075 | ATCCCAAA GGCTAGCTACAACGA AGGCACTT | 3403 |
| 4796 | UGUUUGGG A UAAUGAUA | 1076 | TATCATTA GGCTAGCTACAACGA CCCAAACA | 3404 |
| 4799 | UUGGGAUA A UGAUAGGU | 1077 | ACCTATCA GGCTAGCTACAACGA TATCCCAA | 3405 |
| 4802 | GGAUAAUG A UAGGUAAU | 1078 | ATTACCTA GGCTAGCTACAACGA CATTATCC | 3406 |
| 4806 | AAUGAUAG G UAAUUUAG | 1079 | CTAAATTA GGCTAGCTACAACGA CTATCATT | 3407 |
| 4809 | GAUAGGUA A UUUAGAUG | 1080 | CATCTAAA GGCTAGCTACAACGA TACCTATC | 3408 |
| 4815 | UAAUUUAG A UGAAUUUA | 1081 | TAAATTCA GGCTAGCTACAACGA CTAAATTA | 3409 |
| 4819 | UUAGAUGA A UUUAGGGG | 1082 | CCCCTAAA GGCTAGCTACAACGA TCATCTAA | 3410 |
| 4836 | AAAAAAAA G UUAUCUGC | 1083 | GCAGATAA GGCTAGCTACAACGA TTTTTTTT | 3411 |
| 4839 | AAAAAGUU A UCUGCAGU | 1084 | ACTGCAGA GGCTAGCTACAACGA AACTTTTT | 3412 |
| 4843 | AGUUAUCU G CAGUUAUG | 1085 | CATAACTG GGCTAGCTACAACGA AGATAACT | 3413 |
| 4846 | UAUCUGCA G UUAUGUUG | 1086 | CAACATAA GGCTAGCTACAACGA TGCAGATA | 3414 |
| 4849 | CUGCAGUU A UGUUGAGG | 1087 | CCTCAACA GGCTAGCTACAACGA AACTGCAG | 3415 |
| 4851 | GCAGUUAU G UUGAGGGC | 1088 | GCCCTCAA GGCTAGCTACAACGA ATAACTGC | 3416 |
| 4858 | UGUUGAGG G CCCAUCUC | 1089 | GAGATGGG GGCTAGCTACAACGA CCTCAACA | 3417 |
| 4862 | GAGGGCCC A UCUCUCCC | 1090 | GGGAGAGA GGCTAGCTACAACGA GGGCCCTC | 3418 |
| 4874 | CUCCCCCC A CACCCCCA | 1091 | TGGGGGTG GGCTAGCTACAACGA GGGGGGAG | 3419 |
| 4876 | CCCCCCAC A CCCCCACA | 1092 | TGTGGGGG GGCTAGCTACAACGA GTGGGGGG | 3420 |
| 4882 | ACACCCCC A CAGAGCUA | 1093 | TAGCTCTG GGCTAGCTACAACGA GGGGGTGT | 3421 |
| 4887 | CCCACAGA G CUAACUGG | 1094 | CCAGTTAG GGCTAGCTACAACGA TCTGTGGG | 3422 |
| 4891 | CAGAGCUA A CUGGGUUA | 1095 | TAACCCAG GGCTAGCTACAACGA TAGCTCTG | 3423 |
| 4896 | CUAACUGG G UUACAGUG | 1096 | CACTGTAA GGCTAGCTACAACGA CCAGTTAG | 3424 |
| 4899 | ACUGGGUU A CAGUGUUU | 1097 | AAACACTG GGCTAGCTACAACGA AACCCAGT | 3425 |
| 4902 | GGGUUACA G UGUUUUAU | 1098 | ATAAAACA GGCTAGCTACAACGA TGTAACCC | 3426 |
| 4904 | GUUACAGU G UUUUAUCC | 1099 | GGATAAAA GGCTAGCTACAACGA ACTGTAAC | 3427 |
| 4909 | AGUGUUUU A UCCGAAAG | 1100 | CTTTCGGA GGCTAGCTACAACGA AAAACACT | 3428 |
| 4917 | AUCCGAAA G UUUCCAAU | 1101 | ATTGGAAA GGCTAGCTACAACGA TTTCGGAT | 3429 |
| 4924 | AGUUUCCA A UUCCACUG | 1102 | CAGTGGAA GGCTAGCTACAACGA TGGAAACT | 3430 |
| 4929 | CCAAUUCC A CUGUCUUG | 1103 | CAAGACAG GGCTAGCTACAACGA GGAATTGG | 3431 |
| 4932 | AUUCCACU G UCUUGUGU | 1104 | ACACAAGA GGCTAGCTACAACGA AGTGGAAT | 3432 |
| 4937 | ACUGUCUU G UGUUUUCA | 1105 | TGAAAACA GGCTAGCTACAACGA AAGACAGT | 3433 |
| 4939 | UGUCUUGU G UUUUCAUG | 1106 | CATGAAAA GGCTAGCTACAACGA ACAAGACA | 3434 |
| 4945 | GUGUUUUC A UGUUGAAA | 1107 | TTTCAACA GGCTAGCTACAACGA GAAAACAC | 3435 |
| 4947 | GUUUUCAU G UUGAAAAU | 1108 | ATTTTCAA GGCTAGCTACAACGA ATGAAAAC | 3436 |
| 4954 | UGUUGAAA A UACUUUUG | 1109 | CAAAAGTA GGCTAGCTACAACGA TTTCAACA | 3437 |
| 4956 | UUGAAAAU A CUUUUGCA | 1110 | TGCAAAAG GGCTAGCTACAACGA ATTTTCAA | 3438 |
| 4962 | AUACUUUU G CAUUUUUC | 1111 | GAAAAATG GGCTAGCTACAACGA AAAAGTAT | 3439 |
| 4964 | ACUUUUGC A UUUUUCCU | 1112 | AGGAAAAA GGCTAGCTACAACGA GCAAAAGT | 3440 |
| 4977 | UCCUUUGA G UGCCAAUU | 1113 | AATTGGCA GGCTAGCTACAACGA TCAAAGGA | 3441 |
| 4979 | CUUUGAGU G CCAAUUUC | 1114 | GAAATTGG GGCTAGCTACAACGA ACTCAAAG | 3442 |
| 4983 | GAGUGCCA A UUUCUUAC | 1115 | GTAAGAAA GGCTAGCTACAACGA TGGCACTC | 3443 |
| 4990 | AAUUUCUU A CUAGUACU | 1116 | AGTACTAG GGCTAGCTACAACGA AAGAAATT | 3444 |
| 4994 | UCUUACUA G UACUAUUU | 1117 | AAATAGTA GGCTAGCTACAACGA TAGTAAGA | 3445 |
| 4996 | UUACUAGU A CUAUUUCU | 1118 | AGAAATAG GGCTAGCTACAACGA ACTAGTAA | 3446 |
| 4999 | CUAGUACU A UUUCUUAA | 1119 | TTAAGAAA GGCTAGCTACAACGA AGTACTAG | 3447 |
| 5007 | AUUUCUUA A UGUAACAU | 1120 | ATGTTACA GGCTAGCTACAACGA TAAGAAAT | 3448 |
| 5009 | UUCUUAAU G UAACAUGU | 1121 | ACATGTTA GGCTAGCTACAACGA ATTAAGAA | 3449 |
| 5012 | UUAAUGUA A CAUGUUUA | 1122 | TAAACATG GGCTAGCTACAACGA TACATTAA | 3450 |
| 5014 | AAUGUAAC A UGUUUACC | 1123 | GGTAAACA GGCTAGCTACAACGA GTTACATT | 3451 |
| 5016 | UGUAACAU G UUUACCUG | 1124 | CAGGTAAA GGCTAGCTACAACGA ATGTTACA | 3452 |
| 5020 | ACAUGUUU A CCUGGCCU | 1125 | AGGCCAGG GGCTAGCTACAACGA AAACATGT | 3453 |
| 5025 | UUUACCUG G CCUGUCUU | 1126 | AAGACAGG GGCTAGCTACAACGA CAGGTAAA | 3454 |
| 5029 | CCUGGCCU G UCUUUUAA | 1127 | TTAAAAGA GGCTAGCTACAACGA AGGCCAGG | 3455 |
| 5037 | GUCUUUUA A CUAUUUUU | 1128 | AAAAATAG GGCTAGCTACAACGA TAAAAGAC | 3456 |
| 5040 | UUUUAACU A UUUUUGUA | 1129 | TACAAAAA GGCTAGCTACAACGA AGTTAAAA | 3457 |
| 5046 | CUAUUUUU G UAUAGUCU | 1130 | ACACTATA GGCTAGCTACAACGA AAAAATAG | 3458 |
| 5048 | AUUUUUGU A UAGUGUAA | 1131 | TTACACTA GGCTAGCTACAACGA ACAAAAAT | 3459 |
| 5051 | UUUGUAUA G UCUAAACU | 1132 | AGTTTACA GGCTAGCTACAACGA TATACAAA | 3460 |
| 5053 | UGUAUAGU G UAAACUGA | 1133 | TCAGTTTA GGCTAGCTACAACGA ACTATACA | 3461 |
| 5057 | UAGUGUAA A CUGAAACA | 1134 | TGTTTCAG GGCTAGCTACAACGA TTACACTA | 3462 |
| 5063 | AAACUGAA A CAUGCACA | 1135 | TGTGCATG GGCTAGCTACAACGA TTCAGTTT | 3463 |
| 5065 | ACUGAAAC A UGCACAUU | 1136 | AATGTGCA GGCTAGCTACAACGA GTTTCAGT | 3464 |
| 5067 | UGAAACAU G CACAUUUU | 1137 | AAAATGTG GGCTAGCTACAACGA ATGTTTCA | 3465 |
| 5069 | AAACAUGC A CAUUUUGU | 1138 | ACAAAATG GGCTAGCTACAACGA GCATGTTT | 3466 |
| 5071 | ACAUGCAC A UUUUGUAC | 1139 | GTACAAAA GGCTAGCTACAACGA GTGCATGT | 3467 |
| 5076 | CACAUUUU G UACAUUGU | 1140 | ACAATGTA GGCTAGCTACAACGA AAAATGTG | 3468 |
| 5078 | CAUUUUGU A CAUUGUGC | 1141 | GCACAATG GGCTAGCTACAACGA ACAAAATG | 3469 |
| 5080 | UUUUGUAC A UUGUGCUU | 1142 | AAGCACAA GGCTAGCTACAACGA GTACAAAA | 3470 |
| 5083 | UGUACAUU G UGCUUUCU | 1143 | AGAAAGCA GGCTAGCTACAACGA AATGTACA | 3471 |
| 5085 | UACAUUGU G CUUUCUUU | 1144 | AAAGAAAG GGCTAGCTACAACGA ACAATGTA | 3472 |
| 5095 | UUUCUUUU G UGGGUCAU | 1145 | ATGACCCA GGCTAGCTACAACGA AAAAGAAA | 3473 |
| 5099 | UUUUGUGG G UCAUAUGC | 1146 | GCATATGA GGCTAGCTACAACGA CCACAAAA | 3474 |
| 5102 | UGUGGGUC A UAUGCAGU | 1147 | ACTGCATA GGCTAGCTACAACGA GACCCACA | 3475 |
| 5104 | UGGGUCAU A UGCAGUGU | 1148 | ACACTGCA GGCTAGCTACAACGA ATGACCCA | 3476 |
| 5106 | GGUCAUAU G CAGUGUGA | 1149 | TCACACTG GGCTAGCTACAACGA ATATGACC | 3477 |
| 5109 | CAUAUGCA G UGUGAUCC | 1150 | GGATCACA GGCTAGCTACAACGA TGCATATG | 3478 |
| 5111 | UAUGCAGU G UGAUCCAG | 1151 | CTGGATCA GGCTAGCTACAACGA ACTGCATA | 3479 |
| 5114 | GCAGUGUG A UCCAGUUG | 1152 | CAACTGGA GGCTAGCTACAACGA CACACTGC | 3480 |
| 5119 | GUGAUCCA G UUGUUUUC | 1153 | GAAAACAA GGCTAGCTACAACGA TGGATCAC | 3481 |
| 5122 | AUCCAGUU G UUUUCCAU | 1154 | ATGGAAAA GGCTAGCTACAACGA AACTGGAT | 3482 |
| 5129 | UGUUUUCC A UCAUUUGG | 1155 | CCAAATGA GGCTAGCTACAACGA GGAAAACA | 3483 |
| 5132 | UUUCCAUC A UUUGGUUG | 1156 | CAACCAAA GGCTAGCTACAACGA GATGGAAA | 3484 |
| 5137 | AUCAUUUG G UUGCGCUG | 1157 | CAGCGCAA GGCTAGCTACAACGA CAAATGAT | 3485 |
| 5140 | AUUUGGUU G CGCUGACC | 1158 | GGTCAGCG GGCTAGCTACAACGA AACCAAAT | 3486 |
| 5142 | UUGGUUGC G CUGACCUA | 1159 | TAGGTCAG GGCTAGCTACAACGA GCAACCAA | 3487 |
| 5146 | UUGCGCUG A CCUAGGAA | 1160 | TTCCTAGG GGCTAGCTACAACGA CAGCGCAA | 3488 |
| 5154 | ACCUAGGA A UGUUGGUC | 1161 | GACCAACA GGCTAGCTACAACGA TCCTAGGT | 3489 |
| 5156 | CUAGGAAU G UUGGUCAU | 1162 | ATGACCAA GGCTAGCTACAACGA ATTCCTAG | 3490 |
| 5160 | GAAUGUUG G UCAUAUCA | 1163 | TGATATGA GGCTAGCTACAACGA CAACATTC | 3491 |
| 5163 | UGUUGGUC A UAUCAAAC | 1164 | GTTTGATA GGCTAGCTACAACGA GACCAACA | 3492 |
| 5165 | UUGGUCAU A UCAAACAU | 1165 | ATGTTTGA GGCTAGCTACAACGA ATGACCAA | 3493 |
| 5170 | CAUAUCAA A CAUUAAAA | 1166 | TTTTAATG GGCTAGCTACAACGA TTGATATG | 3494 |
| 5172 | UAUCAAAC A UUAAAAAU | 1167 | ATTTTTAA GGCTAGCTACAACGA GTTTGATA | 3495 |
| 5179 | CAUUAAAA A UGACCACU | 1168 | AGTGGTCA GGCTAGCTACAACGA TTTTAATG | 3496 |
| 5182 | UAAAAAUG A CCACUCUU | 1169 | AAGAGTGG GGCTAGCTACAACGA CATTTTTA | 3497 |
| 5185 | AAAUGACC A CUCUUUUA | 1170 | TAAAAGAG GGCTAGCTACAACGA GGTCATTT | 3498 |
| 5194 | CUCUUUUA A UGAAAUUA | 1171 | TAATTTCA GGCTAGCTACAACGA TAAAAGAG | 3499 |
| 5199 | UUAAUGAA A UUAACUUU | 1172 | AAAGTTAA GGCTAGCTACAACGA TTCATTAA | 3500 |
| 5203 | UGAAAUUA A CUUUUAAA | 1173 | TTTAAAAG GGCTAGCTACAACGA TAATTTCA | 3501 |
| 5211 | ACUUUUAA A UGUUUAUA | 1174 | TATAAACA GGCTAGCTACAACGA TTAAAAGT | 3502 |
| 5213 | UUUUAAAU G UUUAUAGG | 1175 | CCTATAAA GGCTAGCTACAACGA ATTTAAAA | 3503 |
| 5217 | AAAUGUUU A UAGGAGUA | 1176 | TACTCCTA GGCTAGCTACAACGA AAACATTT | 3504 |
| 5223 | UUAUAGGA G UAUGUGCU | 1177 | AGCACATA GGCTAGCTACAACGA TCCTATAA | 3505 |
| 5225 | AUAGGAGU A UGUGCUGU | 1178 | ACAGCACA GGCTAGCTACAACGA ACTCCTAT | 3506 |
| 5227 | AGGAGUAU G UGCUGUGA | 1179 | TCACAGCA GGCTAGCTACAACGA ATACTCCT | 3507 |
| 5229 | GAGUAUGU G CUGUGAAG | 1180 | CTTCACAG GGCTAGCTACAACGA ACATACTC | 3508 |
| 5232 | UAUGUGCU G UGAAGUGA | 1181 | TCACTTCA GGCTAGCTACAACGA AGCACATA | 3509 |
| 5237 | GCUGUGAA G UGAUCUAA | 1182 | TTAGATCA GGCTAGCTACAACGA TTCACAGC | 3510 |
| 5240 | GUGAAGUG A UCUAAAAU | 1183 | ATTTTAGA GGCTAGCTACAACGA CACTTCAC | 3511 |
| 5247 | GAUCUAAA A UUUGUAAU | 1184 | ATTACAAA GGCTAGCTACAACGA TTTAGATC | 3512 |
| 5251 | UAAAAUUU G UAAUAUUU | 1185 | AAATATTA GGCTAGCTACAACGA AAATTTTA | 3513 |
| 5254 | AAUUUGUA A UAUUUUUG | 1186 | CAAAAATA GGCTAGCTACAACGA TACAAATT | 3514 |
| 5256 | UUUGUAAU A UUUUUGUC | 1187 | GACAAAAA GGCTAGCTACAACGA ATTACAAA | 3515 |
| 5262 | AUAUUUUU G UCAUGAAC | 1188 | GTTCATGA GGCTAGCTACAACGA AAAAATAT | 3516 |
| 5265 | UUUUUGUC A UGAACUGU | 1189 | ACAGTTCA GGCTAGCTACAACGA GACAAAAA | 3517 |
| 5269 | UGUCAUGA A CUGUACUA | 1190 | TAGTACAG GGCTAGCTACAACGA TCATGACA | 3518 |
| 5272 | CAUGAACU G UACUACUC | 1191 | GAGTAGTA GGCTAGCTACAACGA AGTTCATG | 3519 |
| 5274 | UGAACUGU A CUACUCCU | 1192 | AGGAGTAG GGCTAGCTACAACGA ACAGTTCA | 3520 |
| 5277 | ACUGUACU A CUCCUAAU | 1193 | ATTAGGAG GGCTAGCTACAACGA AGTACAGT | 3521 |
| 5284 | UACUCCUA A UUAUUGUA | 1194 | TACAATAA GGCTAGCTACAACGA TAGGAGTA | 3522 |
| 5287 | UCCUAAUU A UUGUAAUG | 1195 | CATTACAA GGCTAGCTACAACGA AATTAGGA | 3523 |
| 5290 | UAAUUAUU G UAAUGUAA | 1196 | TTACATTA GGCTAGCTACAACGA AATAATTA | 3524 |
| 5293 | UUAUUGUA A UGUAAUAA | 1197 | TTATTACA GGCTAGCTACAACGA TACAATAA | 3525 |
| 5295 | AUUGUAAU G UAAUAAAA | 1198 | TTTTATTA GGCTAGCTACAACGA ATTACAAT | 3526 |
| 5298 | GUAAUGUA A UAAAAAUA | 1199 | TATTTTTA GGCTAGCTACAACGA TACATTAC | 3527 |
| 5304 | UAAUAAAA A UAGUUACA | 1200 | TGTAACTA GGCTAGCTACAACGA TTTTATTA | 3528 |
| 5307 | UAAAAAUA G UUACAGUG | 1201 | CACTGTAA GGCTAGCTACAACGA TATTTTTA | 3529 |
| 5310 | AAAUAGUU A CAGUGACU | 1202 | AGTCACTG GGCTAGCTACAACGA AACTATTT | 3530 |
| 5313 | UAGUUACA G UGACUAUG | 1203 | CATAGTCA GGCTAGCTACAACGA TGTAACTA | 3531 |
| 5316 | UUACAGUG A CUAUGAGU | 1204 | ACTCATAG GGCTAGCTACAACGA CACTGTAA | 3532 |
| 5319 | CAGUGACU A UGAGUGUG | 1205 | CACACTCA GGCTAGCTACAACGA AGTCACTG | 3533 |
| 5323 | GACUAUGA G UGUGUAUU | 1206 | AATACACA GGCTAGCTACAACGA TCATAGTC | 3534 |
| 5325 | CUAUGAGU G UGUAUUUA | 1207 | TAAATACA GGCTAGCTACAACGA ACTCATAG | 3535 |
| 5327 | AUGAGUGU G UAUUUAUU | 1208 | AATAAATA GGCTAGCTACAACGA ACACTCAT | 3536 |
| 5329 | GAGUGUGU A UUUAUUCA | 1209 | TGAATAAA GGCTAGCTACAACGA ACACACTC | 3537 |
| 5333 | GUGUAUUU A UUCAUGCA | 1210 | TGCATGAA GGCTAGCTACAACGA AAATACAC | 3538 |
| 5337 | AUUUAUUC A UGCAAAUU | 1211 | AATTTGCA GGCTAGCTACAACGA GAATAAAT | 3539 |
| 5339 | UUAUUCAU G CAAAUUUG | 1212 | CAAATTTG GGCTAGCTACAACGA ATGAATAA | 3540 |
| 5343 | UCAUGCAA A UUUGAACU | 1213 | AGTTCAAA GGCTAGCTACAACGA TTGCATGA | 3541 |
| 5349 | AAAUUUGA A CUGUUUCC | 1214 | GCAAACAG GGCTAGCTACAACGA TCAAATTT | 3542 |
| 5352 | UUUGAACU G UUUGCCCC | 1215 | GGGGCAAA GGCTAGCTACAACGA AGTTCAAA | 3543 |
| 5356 | AACUGUUU G CCCCGAAA | 1216 | TTTCGGGG GGCTAGCTACAACGA AAACAGTT | 3544 |
| 5364 | GCCCCGAA A UGGAUAUG | 1217 | CATATCCA GGCTAGCTACAACGA TTCGGGGC | 3545 |
| 5368 | CGAAAUGG A UAUGGAUA | 1218 | TATCCATA GGCTAGCTACAACGA CCATTTCG | 3546 |
| 5370 | AAAUGGAU A UGGAUACU | 1219 | AGTATCCA GGCTAGCTACAACGA ATCCATTT | 3547 |
| 5374 | GGAUAUGG A UACUUUAU | 1220 | ATAAAGTA GGCTAGCTACAACGA CCATATCC | 3548 |
| 5376 | AUAUGGAU A CUUUAUAA | 1221 | TTATAAAG GGCTAGCTACAACGA ATCCATAT | 3549 |
| 5381 | GAUACUUU A UAAGCCAU | 1222 | ATGGCTTA GGCTAGCTACAACGA AAAGTATC | 3550 |
| 5385 | CUUUAUAA G CCAUAGAC | 1223 | GTCTATGG GGCTAGCTACAACGA TTATAAAG | 3551 |
| 5388 | UAUAAGCC A UAGACACU | 1224 | AGTGTCTA GGCTAGCTACAACGA GGCTTATA | 3552 |
| 5392 | AGCCAUAG A CACUAUAG | 1225 | CTATAGTG GGCTAGCTACAACGA CTATGGCT | 3553 |
| 5394 | CCAUAGAC A CUAUAGUA | 1226 | TACTATAG GGCTAGCTACAACGA GTCTATGG | 3554 |
| 5397 | UAGACACU A UAGUAUAC | 1227 | GTATACTA GGCTAGCTACAACGA AGTGTCTA | 3555 |
| 5400 | ACACUAUA G UAUACCAG | 1228 | CTGGTATA GGCTAGCTACAACGA TATAGTGT | 3556 |
| 5402 | ACUAUAGU A UACCAGUG | 1229 | CACTGGTA GGCTAGCTACAACGA ACTATAGT | 3557 |
| 5404 | UAUAGUAU A CCAGUGAA | 1230 | TTCACTGG GGCTAGCTACAACGA ATACTATA | 3558 |
| 5408 | GUAUACCA G UGAAUCUU | 1231 | AAGATTCA GGCTAGCTACAACGA TGGTATAC | 3559 |
| 5412 | ACCAGUGA A UCUUUUAU | 1232 | ATAAAAGA GGCTAGCTACAACGA TCACTGGT | 3560 |
| 5419 | AAUCUUUU A UGCAGCUU | 1233 | AAGCTGCA GGCTAGCTACAACGA AAAAGATT | 3561 |
| 5421 | UCUUUUAU G CAGCUUGU | 1234 | ACAAGCTG GGCTAGCTACAACGA ATAAAAGA | 3562 |
| 5424 | UUUAUGCA G CUUGUUAG | 1235 | CTAACAAG GGCTAGCTACAACGA TGCATAAA | 3563 |
| 5428 | UGCAGCUU G UUAGAAGU | 1236 | ACTTCTAA GGCTAGCTACAACGA AAGCTGCA | 3564 |
| 5435 | UGUUAGAA G UAUCCUUU | 1237 | AAAGGATA GGCTAGCTACAACGA TTCTAACA | 3565 |
| 5437 | UUAGAAGU A UCCUUUUA | 1238 | TAAAAGGA GGCTAGCTACAACGA ACTTCTAA | 3566 |
| 5445 | AUCCUUUU A UUUUCUAA | 1239 | TTAGAAAA GGCTAGCTACAACGA AAAAGGAT | 3567 |
| 5457 | UCUAAAAG G UGCUGUGG | 1240 | CCACAGCA GGCTAGCTACAACGA CTTTTAGA | 3568 |
| 5459 | UAAAAGGU G CUGUGGAU | 1241 | ATCCACAG GGCTAGCTACAACGA ACCTTTTA | 3569 |
| 5462 | AAGGUGCU G UGGAUAUU | 1242 | AATATCCA GGCTAGCTACAACGA AGCACCTT | 3570 |
| 5466 | UGCUGUGG A UAUUAUGU | 1243 | ACATAATA GGCTAGCTACAACGA CCACAGCA | 3571 |
| 5468 | CUGUGGAU A UUAUGUAA | 1244 | TTACATAA GGCTAGCTACAACGA ATCCACAG | 3572 |
| 5471 | UGGAUAUU A UGUAAAGG | 1245 | CCTTTACA GGCTAGCTACAACGA AATATCCA | 3573 |
| 5473 | GAUAUUAU G UAAAGGCG | 1246 | CGCCTTTA GGCTAGCTACAACGA ATAATATC | 3574 |
| 5479 | AUGUAAAG G CGUGUUUG | 1247 | CAAACACG GGCTAGCTACAACGA CTTTACAT | 3575 |
| 5481 | GUAAAGGC G UGUUUGCU | 1248 | AGCAAACA GGCTAGCTACAACGA GCCTTTAC | 3576 |
| 5483 | AAAGGCGU G UUUGCUUA | 1249 | TAAGCAAA GGCTAGCTACAACGA ACGCCTTT | 3577 |
| 5487 | GCGUGUUU G CUUAAACA | 1250 | TGTTTAAG GGCTAGCTACAACGA AAACACGC | 3578 |
| 5493 | UUGCUUAA A CAAUUUUC | 1251 | GAAAATTG GGCTAGCTACAACGA TTAAGCAA | 3579 |
| 5496 | CUUAAACA A UUUUCCAU | 1252 | ATGGAAAA GGCTAGCTACAACGA TGTTTAAG | 3580 |
| 5503 | AAUUUUCC A UAUUUAGA | 1253 | TCTAAATA GGCTAGCTACAACGA GGAAAATT | 3581 |
| 5505 | UUUUCCAU A UUUAGAAG | 1254 | CTTCTAAA GGCTAGCTACAACGA ATGGAAAA | 3582 |
| 5513 | AUUUAGAA G UAGAUGCA | 1255 | TGCATCTA GGCTAGCTACAACGA TTCTAAAT | 3583 |
| 5517 | AGAAGUAG A UGCAAAAC | 1256 | GTTTTGCA GGCTAGCTACAACGA CTACTTCT | 3584 |
| 5519 | AAGUAGAU G CAAAACAA | 1257 | TTGTTTTG GGCTAGCTACAACGA ATCTACTT | 3585 |
| 5524 | GAUGCAAA A CAAAUCUG | 1258 | CAGATTTG GGCTAGCTACAACGA TTTGCATC | 3586 |
| 5528 | CAAAACAA A UCUGCCUU | 1259 | AAGGCAGA GGCTAGCTACAACGA TTGTTTTG | 3587 |
| 5532 | ACAAAUCU G CCUUUAUG | 1260 | CATAAAGG GGCTAGCTACAACGA AGATTTGT | 3588 |
| 5538 | CUGCCUUU A UGACAAAA | 1261 | TTTTGTCA GGCTAGCTACAACGA AAAGGCAG | 3589 |
| 5541 | CCUUUAUG A CAAAAAAA | 1262 | TTTTTTTG GGCTAGCTACAACGA CATAAAGG | 3590 |
| 5549 | ACAAAAAA A UAGGAUAA | 1263 | TTATCCTA GGCTAGCTACAACGA TTTTTTGT | 3591 |
| 5554 | AAAAUAGG A UAACAUUA | 1264 | TAATGTTA GGCTAGCTACAACGA CCTATTTT | 3592 |
| 5557 | AUAGGAUA A CAUUAUUU | 1265 | AAATAATG GGCTAGCTACAACGA TATCCTAT | 3593 |
| 5559 | AGGAUAAC A UUAUUUAU | 1266 | ATAAATAA GGCTAGCTACAACGA GTTATCCT | 3594 |
| 5562 | AUAACAUU A UUUAUUUA | 1267 | TAAATAAA GGCTAGCTACAACGA AATGTTAT | 3595 |
| 5566 | CAUUAUUU A UUUAUUUC | 1268 | GAAATAAA GGCTAGCTACAACGA AAATAATG | 3596 |
| 5570 | AUUUAUUU A UUUCCUUU | 1269 | AAAGGAAA GGCTAGCTACAACGA AAATAAAT | 3597 |
| 5580 | UUCCUUUU A UCAAUAAG | 1270 | CTTATTGA GGCTAGCTACAACGA AAAAGGAA | 3598 |
| 5584 | UUUUAUCA A UAAGGUAA | 1271 | TTACCTTA GGCTAGCTACAACGA TGATAAAA | 3599 |
| 5589 | UCAAUAAG G UAAUUGAU | 1272 | ATCAATTA GGCTAGCTACAACGA CTTATTGA | 3600 |
| 5592 | AUAAGGUA A UUGAUACA | 1273 | TGTATCAA GGCTAGCTACAACGA TACCTTAT | 3601 |
| 5596 | GGUAAUUG A UACACAAC | 1274 | GTTGTGTA GGCTAGCTACAACGA CAATTACC | 3602 |
| 5598 | UAAUUGAU A CACAACAG | 1275 | CTGTTGTG GGCTAGCTACAACGA ATCAATTA | 3603 |
| 5600 | AUUGAUAC A CAACAGGU | 1276 | ACCTGTTG GGCTAGCTACAACGA GTATCAAT | 3604 |
| 5603 | GAUACACA A CAGGUGAC | 1277 | GTCACCTG GGCTAGCTACAACGA TGTGTATC | 3605 |
| 5607 | CACAACAG G UGACUUGG | 1278 | CCAAGTCA GGCTAGCTACAACGA CTGTTGTG | 3606 |
| 5610 | AACAGGUG A CUUGGUUU | 1279 | AAACCAAG GGCTAGCTACAACGA CACCTGTT | 3607 |
| 5615 | GUGACUUG G UUUUAGGC | 1280 | GCCTAAAA GGCTAGCTACAACGA CAAGTCAC | 3608 |
| 5622 | GGUUUUAG G CCCAAAGG | 1281 | CCTTTGGG GGCTAGCTACAACGA CTAAAACC | 3609 |
| 5630 | GCCCAAAG G UAGCAGCA | 1282 | TGCTGCTA GGCTAGCTACAACGA CTTTGGGC | 3610 |
| 5633 | CAAAGGUA G CAGCAGCA | 1283 | TGCTGCTG GGCTAGCTACAACGA TACCTTTG | 3611 |
| 5636 | AGGUAGCA G CAGCAACA | 1284 | TGTTGCTG GGCTAGCTACAACGA TGCTACCT | 3612 |
| 5639 | UAGCAGCA G CAACAUUA | 1285 | TAATGTTG GGCTAGCTACAACGA TGCTGCTA | 3613 |
| 5642 | CAGCAGCA A CAUUAAUA | 1286 | TATTAATG GGCTAGCTACAACGA TGCTGCTG | 3614 |
| 5644 | GCAGCAAC A UUAAUAAU | 1287 | ATTATTAA GGCTAGCTACAACGA GTTGCTGC | 3615 |
| 5648 | CAACAUUA A UAAUGGAA | 1288 | TTCCATTA GGCTAGCTACAACGA TAATGTTG | 3616 |
| 5651 | CAUUAAUA A UGGAAAUA | 1289 | TATTTCCA GGCTAGCTACAACGA TATTAATG | 3617 |
| 5657 | UAAUGGAA A UAAUUGAA | 1290 | TTCAATTA GGCTAGCTACAACGA TTCCATTA | 3618 |
| 5660 | UGGAAAUA A UUGAAUAG | 1291 | CTATTCAA GGCTAGCTACAACGA TATTTCCA | 3619 |
| 5665 | AUAAUUGA A UAGUUAGU | 1292 | ACTAACTA GGCTAGCTACAACGA TCAATTAT | 3620 |
| 5668 | AUUGAAUA G UUAGUUAU | 1293 | ATAACTAA GGCTAGCTACAACGA TATTCAAT | 3621 |
| 5672 | AAUAGUUA G UUAUGUAU | 1294 | ATACATAA GGCTAGCTACAACGA TAACTATT | 3622 |
| 5675 | AGUUAGUU A UGUAUGUU | 1295 | AACATACA GGCTAGCTACAACGA AACTAACT | 3623 |
| 5677 | UUAGUUAU G UAUGUUAA | 1296 | TTAACATA GGCTAGCTACAACGA ATAACTAA | 3624 |
| 5679 | AGUUAUGU A UGUUAAUG | 1297 | CATTAACA GGCTAGCTACAACGA ACATAACT | 3625 |
| 5681 | UUAUGUAU G UUAAUGCC | 1298 | GGCATTAA GGCTAGCTACAACGA ATACATAA | 3626 |
| 5685 | GUAUGUUA A UGCCAGUC | 1299 | GACTGGCA GGCTAGCTACAACGA TAACATAC | 3627 |
| 5687 | AUGUUAAU G CCAGUCAC | 1300 | GTGACTGG GGCTAGCTACAACGA ATTAACAT | 3628 |
| 5691 | UAAUGCCA G UCACCAGC | 1301 | GCTGGTGA GGCTAGCTACAACGA TGGCATTA | 3629 |
| 5694 | UGCCAGUC A CCAGCAGG | 1302 | CCTGCTGG GGCTAGCTACAACGA GACTGGCA | 3630 |
| 5698 | AGUCACCA G CAGGCUAU | 1303 | ATAGCCTG GGCTAGCTACAACGA TGGTGACT | 3631 |
| 5702 | ACCAGCAG G CUAUUUCA | 1304 | TGAAATAG GGCTAGCTACAACGA CTGCTGGT | 3632 |
| 5705 | AGCAGGCU A UUUCAAGG | 1305 | CCTTGAAA GGCTAGCTACAACGA AGCCTGCT | 3633 |
| 5713 | AUUUCAAG G UCAGAAGU | 1306 | ACTTCTGA GGCTAGCTACAACGA CTTGAAAT | 3634 |
| 5720 | GGUCAGAA G UAAUGACU | 1307 | AGTCATTA GGCTAGCTACAACGA TTCTGACC | 3635 |
| 5723 | CAGAAGUA A UGACUCCA | 1308 | TGGAGTCA GGCTAGCTACAACGA TACTTCTG | 3636 |
| 5726 | AAGUAAUG A CUCCAUAC | 1309 | GTATGCAG GGCTAGCTACAACGA CATTACTT | 3637 |
| 5731 | AUGACUCC A UACAUAUU | 1310 | AATATGTA GGCTAGCTACAACGA GGAGTCAT | 3638 |
| 5733 | GACUCCAU A CAUAUUAU | 1311 | ATAATATG GGCTAGCTACAACGA ATGGAGTC | 3639 |
| 5735 | CUCCAUAC A UAUUAUUU | 1312 | AAATAATA GGCTAGCTACAACGA GTATGGAG | 3640 |
| 5737 | CCAUACAU A UUAUUUAU | 1313 | ATAAATAA GGCTAGCTACAACGA ATGTATGG | 3641 |
| 5740 | UACAUAUU A UUUAUUUC | 1314 | GAAATAAA GGCTAGCTACAACGA AATATGTA | 3642 |
| 5744 | UAUUAUUU A UUUCUAUA | 1315 | TATAGAAA GGCTAGCTACAACGA AAATAATA | 3643 |
| 5750 | UUAUUUCU A UAACUACA | 1316 | TGTAGTTA GGCTAGCTACAACGA AGAAATAA | 3644 |
| 5753 | UUUCUAUA A CUACAUUU | 1317 | AAATGTAG GGCTAGCTACAACGA TATAGAAA | 3645 |
| 5756 | CUAUAACU A CAUUUAAA | 1318 | TTTAAATG GGCTAGCTACAACGA AGTTATAG | 3646 |
| 5758 | AUAACUAC A UUUAAAUC | 1319 | GATTTAAA GGCTAGCTACAACGA GTAGTTAT | 3647 |
| 5764 | ACAUUUAA A UCAUUACC | 1320 | GGTAATGA GGCTAGCTACAACGA TTAAATGT | 3648 |
| 5767 | UUUAAAUC A UUACCAGG | 1321 | CCTGGTAA GGCTAGCTACAACGA GATTTAAA | 3649 |

Input Sequence = NM_004985.
Cut Site = R/Y
Arm Length = 8.
Core Sequence = GGCTAGCTACAACGA
NM_004985 (Homo sapiens v-Ki-ras2 Kirsten rat sarcoma 2 viral oncogene homolog (KRas2), mRNA; 5775 nt)

[0382] TABLE III
Human H-Ras DNAzyme and Target molecules

| | | | | |
|---|---|---|---|---|
| | | Seq | | Seq |
| Pos | Substrate | ID | DNAzyme | ID |

| | | | | |
|---|---|---|---|---|
| 9 | GGAUCCCA G CCUUUCCC | 1322 | GGGAAAGG GGCTAGCTACAACGA TGGGATCC | 3650 |
| 20 | UUUCCCCA G CCCGUAGC | 1323 | GCTACGGG GGCTAGCTACAACGA TGGGGAAA | 3651 |
| 24 | CCCAGCCC G UAGCCCCG | 1324 | CGGGGCTA GGCTAGCTACAACGA GGGCTGGG | 3652 |
| 27 | AGCCCGUA G CCCCGGGA | 1325 | TCCCGGGG GGCTAGCTACAACGA TACGGGCT | 3653 |
| 35 | GCCCCGGG A CCUCCGCG | 1326 | CGCGGAGG GGCTAGCTACAACGA CCCGGGGC | 3654 |
| 41 | GGACCUCC G CGGUGGGC | 1327 | GCCCACCG GGCTAGCTACAACGA GGAGGTCC | 3655 |
| 44 | CCUCCGCG G UGGGCGGC | 1328 | GCCGCCCA GGCTAGCTACAACGA CGCGGAGG | 3656 |
| 48 | CGCGGUGG G CGGCGCCG | 1329 | CGGCGCCG GGCTAGCTACAACGA CCACCGCG | 3657 |
| 51 | GGUGGGCG G CGCCGCGC | 1330 | GCGCGGCG GGCTAGCTACAACGA CGCCCACC | 3658 |
| 53 | UGGGCGGC G CCGCGCUG | 1331 | CAGCGCGG GGCTAGCTACAACGA GCCGCCCA | 3659 |
| 56 | GCGGCGCC G CGCUGCCG | 1332 | CGGCAGCG GGCTAGCTACAACGA GGCGCCGC | 3660 |
| 58 | GGCGCCGC G CUGCCGGC | 1333 | GCCGGCAG GGCTAGCTACAACGA GCGGCGCC | 3661 |
| 61 | GCCGCGCU G CCGGCGCA | 1334 | TGCGCCGG GGCTAGCTACAACGA AGCGCGGC | 3662 |
| 65 | CGCUGCCG G CGCAGGGA | 1335 | TCCCTGCG GGCTAGCTACAACGA CGGCAGCG | 3663 |
| 67 | CUGCCGGC G CAGGGAGG | 1336 | CCTCCCTG GGCTAGCTACAACGA GCCGGCAG | 3664 |
| 76 | CAGGGAGG G CCUCUGGU | 1337 | ACCAGAGG GGCTAGCTACAACGA CCTCCCTG | 3665 |
| 83 | GGCCUCUG G UGCACCGG | 1338 | CCGGTGCA GGCTAGCTACAACGA CAGAGGCC | 3666 |
| 85 | CCUCUGGU G CACCGGCA | 1339 | TGCCGGTG GGCTAGCTACAACGA ACCAGAGG | 3667 |
| 87 | UCUGGUGC A CCGGCACC | 1340 | GGTGCCGG GGCTAGCTACAACGA GCACCAGA | 3668 |
| 91 | GUGCACCG G CACCGCUG | 1341 | CAGCGGTG GGCTAGCTACAACGA CGGTGCAC | 3669 |
| 93 | GCACCGGC A CCGCUGAG | 1342 | CTCAGCGG GGCTAGCTACAACGA GCCGGTGC | 3670 |
| 96 | CCGGCACC G CUGAGUCG | 1343 | CGACTCAG GGCTAGCTACAACGA GGTGCCGG | 3671 |
| 101 | ACCGCUGA G UCGGGUUC | 1344 | GAACCCGA GGCTAGCTACAACGA TCAGCGGT | 3672 |
| 106 | UGAGUCGG G UUCUCUCG | 1345 | CGAGAGAA GGCTAGCTACAACGA CCGACTCA | 3673 |
| 114 | GUUCUCUC G CCGGCCUG | 1346 | CAGGCCGG GGCTAGCTACAACGA GAGAGAAC | 3674 |
| 118 | UCUCGCCG G CCUGUUCC | 1347 | GGAACAGG GGCTAGCTACAACGA CGGCGAGA | 3675 |
| 122 | GCCGGCCU G UUCCCGGG | 1348 | CCCGGGAA GGCTAGCTACAACGA AGGCCGGC | 3676 |
| 134 | CCGGGAGA G CCCGGGGC | 1349 | GCCCCGGG GGCTAGCTACAACGA TCTCCCGG | 3677 |
| 141 | AGCCCGGG G CCCUGCUC | 1350 | GAGCAGGG GGCTAGCTACAACGA CCCGGGCT | 3678 |
| 146 | GGGGCCCU G CUCGGAGA | 1351 | TCTCCGAG GGCTAGCTACAACGA AGGGCCCC | 3679 |
| 154 | GCUCGGAG A UGCCGCCC | 1352 | GGGCGGCA GGCTAGCTACAACGA CTCCGAGC | 3680 |
| 156 | UCGGAGAU G CCGCCCCC | 1353 | CGGGGCGG GGCTAGCTACAACGA ATCTCCGA | 3681 |
| 159 | GAGAUGCC G CCCCGGGC | 1354 | GCCCGCGG GGCTAGCTACAACGA GGCATCTC | 3682 |
| 166 | CGCCCCGG G CCCCCAGA | 1355 | TCTGCGGG GGCTAGCTACAACGA CCGGGGCG | 3683 |
| 174 | GCCCCCAG A CACCGGCU | 1356 | AGCCGGTG GGCTAGCTACAACGA CTGGGGCC | 3684 |
| 176 | CCCCAGAC A CCGGCUCC | 1357 | GGAGCCGG GGCTAGCTACAACGA GTCTGGGG | 3685 |
| 180 | AGACACCG G CUCCCUGG | 1358 | CCAGGGAC GGCTAGCTACAACGA CGCTGTCT | 3686 |
| 188 | GCUCCCUG G CCUUCCUC | 1359 | GAGGAAGG GGCTAGCTACAACGA CAGGGAGC | 3687 |
| 199 | UUCCUCGA G CAACCCCG | 1360 | CGGGGTTG GGCTAGCTACAACGA TCGAGGAA | 3688 |
| 202 | CUCGACCA A CCCCGAGC | 1361 | GCTCGGGG GGCTAGCTACAACGA TGCTCGAC | 3689 |
| 209 | AACCCCGA G CUCGGCUC | 1362 | GAGCCGAG GGCTAGCTACAACGA TCGGGCTT | 3690 |
| 214 | CGACCUCG G CUCCGGUC | 1363 | GACCGGAG GGCTAGCTACAACGA CGAGCTCG | 3691 |
| 220 | CGGCUCCG G UCUCCAGC | 1364 | GCTGGAGA GGCTAGCTACAACGA CGGAGCCG | 3692 |
| 227 | GGUCUCCA G CCAAGCCC | 1365 | GGGCTTGG GGCTAGCTACAACGA TGGACACC | 3693 |
| 232 | CCAGCCAA G CCCAACCC | 1366 | GGGTTGGG GGCTAGCTACAACGA TTGGCTGG | 3694 |
| 237 | CAAGCCCA A CCCCGAGA | 1367 | TCTCGGGG GGCTAGCTACAACGA TGGGCTTG | 3695 |
| 247 | CCCGAGAG G CCGCGGCC | 1368 | GGCCGCGG GGCTAGCTACAACGA CTCTCGGG | 3696 |
| 250 | GAGAGGCC G CGGCCCUA | 1369 | TAGGGCCG GGCTAGCTACAACGA GGCCTCTC | 3697 |
| 253 | AGGCCGCG G CCCUACUG | 1370 | CAGTAGGG GGCTAGCTACAACGA CGCGGCCT | 3698 |
| 258 | GCGGCCCU A CUGGCUCC | 1371 | GGAGCCAG GGCTAGCTACAACGA AGGGCCGC | 3699 |
| 262 | CCCUACUG G CUCCGCCU | 1372 | AGGCGGAG GGCTAGCTACAACGA CAGTAGGG | 3700 |
| 267 | CUGGCUCC G CCUCCCCC | 1373 | GCGGGACG GGCTAGCTACAACGA GGAGCCAG | 3701 |
| 274 | CGCCUCCC G CGUUGCUC | 1374 | GAGCAACG GGCTAGCTACAACGA GGGAGGCG | 3702 |
| 276 | CCUCCCGC G UUGCUCCC | 1375 | GGGAGCAA GGCTAGCTACAACGA GCGGGAGG | 3703 |
| 279 | CCCGCGUU G CUCCCGGA | 1376 | TCCGGGAG GGCTAGCTACAACGA AACGCGGG | 3704 |
| 289 | UCCCGGAA G CCCCGCCC | 1377 | GGGCGGGG GGCTAGCTACAACGA TTCCGGGA | 3705 |
| 294 | GAACCCCC G CCCGACCG | 1378 | CGGTCGGG GGCTAGCTACAACGA GGGGCTTC | 3706 |
| 299 | CCCGCCCC A CCGCGGCU | 1379 | AGCCGCGG GGCTAGCTACAACGA CGGGCGGG | 3707 |
| 302 | GCCCGACC G CGGCUCCU | 1380 | AGGAGCCG GGCTAGCTACAACGA GGTCGGGC | 3708 |
| 305 | CGACCGCG G CUCCUGAC | 1381 | GTCAGGAC GGCTAGCTACAACGA CGCGGTCG | 3709 |
| 312 | GGCUCCUG A CAGACGGG | 1382 | CCCGTCTG GGCTAGCTACAACGA CAGGACCC | 3710 |
| 316 | CCUGACAG A CGGGCCGC | 1383 | GCGGCCCG GGCTAGCTACAACGA CTGTCAGG | 3711 |
| 320 | ACAGACGG G CCGCUCAG | 1384 | CTGAGCGG GGCTAGCTACAACGA CCGTCTGT | 3712 |
| 323 | CACGGGCC G CUCAGCCA | 1385 | TGGCTGAG GGCTAGCTACAACGA GGCCCGTC | 3713 |
| 328 | GCCCCUCA G CCAACCGG | 1386 | CCGGTTGG GGCTAGCTACAACGA TGAGCGGC | 3714 |
| +G | | | | |
| 332 | CUCAGCCA A CCGGGGUG | 1387 | CACCCCGG GGCTAGCTACAACGA TGGCTGAG | 3715 |
| 338 | CAACCGGG G UGGGGCGG | 1388 | CCGCCCCA GGCTAGCTACAACGA CCCGGTTG | 3716 |
| 343 | GGGCUGGG G CGGGGCCC | 1389 | GGGCCCCG GGCTAGCTACAACGA CCCACCCC | 3717 |
| 348 | GGGGCGGG G CCCGAUGG | 1390 | CCATCGGG GGCTAGCTACAACGA CCCGCCCC | 3718 |
| 353 | GGGGCCCG A UGGCGCGC | 1391 | GCGCGCCA GGCTAGCTACAACGA CGGGCCCC | 3719 |
| 356 | GCCCGAUG G CGCGCAGC | 1392 | GCTGCGCG GGCTAGCTACAACGA CATCCGGC | 3720 |
| 358 | CCGAUGGC G CGCAGCCA | 1393 | TGGCTGCG GGCTAGCTACAACGA GCCATCGG | 3721 |
| 360 | GAUGGCGC G CAGCCAAU | 1394 | ATTGGCTG GGCTAGCTACAACGA GCGCCATC | 3722 |
| 363 | GGCGCGCA G CCAAUGGU | 1395 | ACCATTGG GGCTAGCTACAACGA TGCGCGCC | 3723 |
| 367 | CGCAGCCA A UGGUAGGC | 1396 | GCCTACCA GGCTAGCTACAACGA TGGCTGCG | 3724 |
| 370 | AGCCAAUG G UAGGCCGC | 1397 | GCGGCCTA GGCTAGCTACAACGA CATTGGCT | 3725 |
| 374 | AAUGGUAG G CCGCGCCU | 1398 | AGGCGCGG GGCTAGCTACAACGA CTACCATT | 3726 |
| 377 | GGUAGGCC G CGCCUGGC | 1399 | GCCAGGCG GGCTAGCTACAACGA GGCCTACC | 3727 |
| 379 | UAGGCCGC G CCUGGCAG | 1400 | CTGCCAGG GGCTAGCTACAACGA GCGCCCTA | 3728 |
| 384 | CGCGCCUG G CAGACGGA | 1401 | TCCGTCTG GGCTAGCTACAACGA CAGGCGCG | 3729 |
| 388 | CCUGGCAG A CGGACGGG | 1402 | CCCGTCCG GGCTAGCTACAACGA CTGCCAGG | 3730 |
| 392 | GCAGACGG A CGGGCGCG | 1403 | CGCGCCCG GGCTAGCTACAACGA CCGTCTGC | 3731 |
| 396 | ACGGACGG G CGCGGGGC | 1404 | GCCCCGCG GGCTAGCTACAACGA CCGTCCGT | 3732 |
| 398 | GGACGGGC G CGGGGCGG | 1405 | CCGCCCCG GGCTAGCTACAACGA GCCCGTCC | 3733 |
| 403 | GGCGCGGG G CGGGGCGU | 1406 | ACGCCCCG GGCTAGCTACAACGA CCCGCGCC | 3734 |
| 408 | GGGGCGGG G CGUGCGCA | 1407 | TGCGCACG GGCTAGCTACAACGA CCCGCCCC | 3735 |
| 410 | GGCGGGGC G UGCGCAGG | 1408 | CCTGCGCA GGCTAGCTACAACGA GCCCCGCC | 3736 |
| 412 | CGGGGCGU G CGCAGGCC | 1409 | GGCCTGCG GGCTAGCTACAACGA ACGCCCCG | 3737 |
| 414 | GGGCGUGC G CAGGCCCG | 1410 | CGGGCCTG GGCTAGCTACAACGA GCACGCCC | 3738 |
| 418 | GUGCGCAG G CCCGCCCG | 1411 | CGGGCGGG GGCTAGCTACAACGA CTGCGCAC | 3739 |
| 422 | GCAGGCCC G CCCGAGUC | 1412 | CACTCGGG GGCTAGCTACAACGA GGGCCTGC | 3740 |
| 428 | CCGCCCGA G UCUCCGCC | 1413 | GGCGGAGA GGCTAGCTACAACGA TCGGGCGG | 3741 |
| 434 | GAGUCUCC G CCGCCCGU | 1414 | ACGGGCGG GGCTAGCTACAACGA GGAGACTC | 3742 |
| 437 | UCUCCGCC G CCCGUGCC | 1415 | GGCACGGG GGCTAGCTACAACGA GGCGGAGA | 3743 |
| 441 | CGCCGCCC G UGCCCUGC | 1416 | GCAGGGCA GGCTAGCTACAACGA GGGCGGCG | 3744 |
| 443 | CCGCCCGU G CCCUGCGC | 1417 | GCGCAGGG GGCTAGCTACAACGA ACGGGCGG | 3745 |
| 448 | CGUGCCCU G CGCCCGCA | 1418 | TGCGGGCG GGCTAGCTACAACGA AGGGCACG | 3746 |
| 450 | UGCCCUGC G CCCGCAAC | 1419 | GTTGCGGG GGCTAGCTACAACGA GCAGGGCA | 3747 |
| 454 | CUGCGCCC G CAACCCGA | 1420 | TCGGGTTG GGCTAGCTACAACGA GGGCGCAG | 3748 |
| 457 | CGCCCGCA A CCCGAGCC | 1421 | GGCTCGGG GGCTAGCTACAACGA TGCGGGCG | 3749 |
| 463 | CAACCCGA G CCGCACCC | 1422 | GGGTGCGG GGCTAGCTACAACGA TCGGGTTG | 3750 |
| 466 | CCCGAGCC G CACCCGCC | 1423 | GGCGGGTG GGCTAGCTACAACGA GGCTCGGG | 3751 |
| 468 | CGAGCCGC A CCCGCCGC | 1424 | GCGGCGGG GGCTAGCTACAACGA GCGGCTCG | 3752 |
| 472 | CCGCACCC G CCGCGGAC | 1425 | GTCCGCGG GGCTAGCTACAACGA GGGTGCGG | 3753 |
| 475 | CACCCGCC G CGGACGGA | 1426 | TCCGTCCG GGCTAGCTACAACGA GGCGGGTG | 3754 |
| 479 | CGCCGCGG A CGGAGCCC | 1427 | GGGCTCCG GGCTAGCTACAACGA CCGCGGCG | 3755 |
| 484 | CGGACGGA G CCCAUGCG | 1428 | CGCATGGG GGCTAGCTACAACGA TCCGTCCG | 3756 |
| 488 | CGGAGCCC A UGCGCGGG | 1429 | CCCGCGCA GGCTAGCTACAACGA GGGCTCCG | 3757 |
| 490 | GAGCCCAU G CGCGGGGC | 1430 | GCCCCGCG GGCTAGCTACAACGA ATGGGCTC | 3758 |
| 492 | GCCCAUGC G CGGGGCGA | 1431 | TCGCCCCG GGCTAGCTACAACGA GCATGGGC | 3759 |
| 497 | UGCGCGGG G CGAACCGC | 1432 | GCGGTTCG GGCTAGCTACAACGA CCCGCGCA | 3760 |
| 501 | CGGGGCGA A CCGCGCGC | 1433 | GCGCGCGG GGCTAGCTACAACGA TCGCCCCG | 3761 |
| 504 | GGCGAACC G CGCGCCCC | 1434 | GGGGCGCG GGCTAGCTACAACGA GGTTCGCC | 3762 |
| 506 | CGAACCGC G CGCCCCCG | 1435 | CGGGGGCG GGCTAGCTACAACGA GCGGTTCG | 3763 |
| 508 | AACCGCGC G CCCCCGCC | 1436 | GGCGGGGG GGCTAGCTACAACGA GCGCGGTT | 3764 |
| 514 | GCGCCCCC G CCCCCGCC | 1437 | GGCGGGGG GGCTAGCTACAACGA GGGGGCGC | 3765 |
| 520 | CCGCCCCC G CCCCGCCC | 1438 | GGGCGGGG GGCTAGCTACAACGA GGGGGCGG | 3766 |
| 525 | CCCGCCCC G CCCCGGCC | 1439 | GGCCGGGG GGCTAGCTACAACGA GGGGCGGG | 3767 |
| 531 | CCGCCCCG G CCUCGGCC | 1440 | GGCCGAGG GGCTAGCTACAACGA CGGGGCGG | 3768 |
| 537 | CGGCCUCG G CCCCGGCC | 1441 | GGCCGGGG GGCTAGCTACAACGA CGAGGCCG | 3769 |
| 543 | CGGCCCCG G CCCUGGCC | 1442 | GGCCAGGG GGCTAGCTACAACGA CGGGGCCG | 3770 |
| 549 | CGGCCCUC G CCCCGGGG | 1443 | CCCCGGGG GGCTAGCTACAACGA CAGGGCCG | 3771 |
| 558 | CCCCGGGG G CAGUCGCG | 1444 | CGCGACTG GGCTAGCTACAACGA CCCCGGGG | 3772 |
| 561 | CGGGGGCA G UCGCGCCU | 1445 | AGGCGCGA GGCTAGCTACAACGA TGCCCCCG | 3773 |
| 564 | GGGCAGUC G CGCCUGUG | 1446 | CACAGGCG GGCTAGCTACAACGA GACTGCCC | 3774 |
| 566 | GCAGUCGC G CCUGUGAA | 1447 | TTCACAGG GGCTAGCTACAACGA GGCACTGC | 3775 |
| 570 | UCGCGCCU G UGAACGGU | 1448 | ACCGTTCA GGCTAGCTACAACGA AGGCGCGA | 3776 |
| 574 | GCCUGUGA A CGGUGAGU | 1449 | ACTCACCG GGCTAGCTACAACGA TCACAGGC | 3777 |
| 577 | UGUGAACC G UGAGUGCG | 1450 | CGCACTCA GGCTAGCTACAACGA CGTTCACA | 3778 |
| 581 | AACGGUGA G UGCGGGCA | 1451 | TGCCCGCA GGCTAGCTACAACGA TCACCGTT | 3779 |
| 583 | CGGUGAGU G CGGGCAGG | 1452 | CCTGCCCG GGCTAGCTACAACGA ACTCACCG | 3780 |
| 587 | GAGUGCGG G CAGGGAUC | 1453 | GATCCCTG GGCTAGCTACAACGA CCGCACTC | 3781 |
| 593 | GGGCAGGG A UCGGCCGG | 1454 | CCGGCCGA GGCTAGCTACAACGA CCCTGCCC | 3782 |
| 597 | AGGGAUCG G CCGGGCCG | 1455 | CGGCCCGG GGCTAGCTACAACGA CGATCCCT | 3783 |
| 602 | UCGGCCGG G CCGCGCGC | 1456 | GCGCGCGG GGCTAGCTACAACGA CCGGCCGA | 3784 |
| 605 | GCCGGGCC G CGCGCCCU | 1457 | AGGGCGCG GGCTAGCTACAACGA GGCCCGGC | 3785 |
| 607 | CGGGCCGC G CGCCCUCC | 1458 | GGAGGGCG GGCTAGCTACAACGA GCGGCCCG | 3786 |
| 609 | GGCCGCGC G CCCUCCUC | 1459 | GAGGAGGG GGCTAGCTACAACGA GCGCGGCC | 3787 |
| 618 | CCCUCCUC G CCCCCAGG | 1460 | CCTGGGGG GGCTAGCTACAACGA GAGGAGGG | 3788 |
| 626 | GCCCCCAG G CGGCAGCA | 1461 | TGCTGCCG GGCTAGCTACAACGA CTGGGGGC | 3789 |
| 629 | CCCAGGCG G CAGCAAUA | 1462 | TATTGCTG GGCTAGCTACAACGA CGCCTGGG | 3790 |
| 632 | AGGCGGCA G CAAUACGC | 1463 | GCGTATTG GGCTAGCTACAACGA TGCCGCCT | 3791 |
| 635 | CGGCAGCA A UACGCGCG | 1464 | CGCGCGTA GGCTAGCTACAACGA TGCTGCCG | 3792 |
| 637 | GCAGCAAU A CGCGCGGC | 1465 | GCCGCGCG GGCTAGCTACAACGA ATTGCTGC | 3793 |
| 639 | AGCAAUAC G CGCGGCGC | 1466 | GCGCCGCG GGCTAGCTACAACGA GTATTGCT | 3794 |
| 641 | CAAUACGC G CGGCGCGG | 1467 | CCGCGCCG GGCTAGCTACAACGA GCGTATTG | 3795 |
| 644 | UACGCGCG G CGCGGGCC | 1468 | GGCCCGCG GGCTAGCTACAACGA CGCGCGTA | 3796 |
| 646 | CGCGCGGC G CGGGCCGG | 1469 | CCGGCCCG GGCTAGCTACAACGA GCCGCGCG | 3797 |
| 650 | CGGCGCGG G CCGGGGGC | 1470 | GCCCCCGG GGCTAGCTACAACGA CCGCGCCG | 3798 |
| 657 | GGCCGGGG G CGCGGGGC | 1471 | GCCCCGCG GGCTAGCTACAACGA CCCCGGCC | 3799 |
| 659 | CCGGGGGC G CGGGGCCG | 1472 | CGGCCCCG GGCTAGCTACAACGA GCCCCCGG | 3800 |
| 664 | GGCGCGGG G CCGGCGGG | 1473 | CCCGCCGG GGCTAGCTACAACGA CCCGCGCC | 3801 |
| 668 | CGGGGCCG G CGGGCGUA | 1474 | TACGCCCG GGCTAGCTACAACGA CGGCCCCG | 3802 |
| 672 | GCCGGCGG G CGUAAGCG | 1475 | CGCTTACG GGCTAGCTACAACGA CCGCCGGC | 3803 |
| 674 | CGGCGGGC G UAAGCGGC | 1476 | GCCGCTTA GGCTAGCTACAACGA GCCCGCCG | 3804 |
| 678 | GGGCGUAA G CGGCGGCG | 1477 | CGCCGCCG GGCTAGCTACAACGA TTACGCCC | 3805 |
| 681 | CGUAAGCG G CGGCGGCG | 1478 | CGCCGCCG GGCTAGCTACAACGA CGCTTACG | 3806 |
| 684 | AAGCGGCG G CGGCGGCG | 1479 | CGCCGCCG GGCTAGCTACAACGA CGCCGCTT | 3807 |
| 687 | CGGCGGCG G CGGCGGCG | 1480 | CGCCGCCG GGCTAGCTACAACGA CGCCGCCG | 3808 |
| 690 | CGGCGGCG G CGGCGGGU | 1481 | ACCCGCCG GGCTAGCTACAACGA CGCCGCCG | 3809 |
| 693 | CGGCGGCG G CGGGUGGG | 1482 | CCCACCCG GGCTAGCTACAACGA CGCCGCCG | 3810 |
| 697 | GGCGGCGG G UGGGUGGG | 1483 | CCCACCCA GGCTAGCTACAACGA CCGCCGCC | 3811 |
| 701 | GCGGGUGG G UGGGGCCG | 1484 | CGGCCCCA GGCTAGCTACAACGA CCACCCGC | 3812 |
| 706 | UGGGUGGG G CCGGGCGG | 1485 | CCGCCCGG GGCTAGCTACAACGA CCCACCCA | 3813 |
| 711 | GGGGCCGG G CGGGGCCC | 1486 | GGGCCCCG GGCTAGCTACAACGA CCGGCCCC | 3814 |
| 716 | CGGGCGGG G CCCGCGGG | 1487 | CCCGCGGG GGCTAGCTACAACGA CCCGCCCG | 3815 |
| 720 | CGGGGCCC G CGGGCACA | 1488 | TGTGCCCG GGCTAGCTACAACGA GGGCCCCG | 3816 |
| 724 | GCCCGCGG G CACAGGUG | 1489 | CACCTGTG GGCTAGCTACAACGA CCGCGGGC | 3817 |
| 726 | CCGCGGGC A CAGGUGAG | 1490 | CTCACCTG GGCTAGCTACAACGA GCCCGCGG | 3818 |
| 730 | GGGCACAG G UGAGCGGG | 1491 | CCCGCTCA GGCTAGCTACAACGA CTGTGCCC | 3819 |
| 734 | ACAGGUGA G CGGGCGUC | 1492 | GACGCCCG GGCTAGCTACAACGA TCACCTGT | 3820 |
| 738 | GUGAGCGG G CGUCGGGG | 1493 | CCCCGACG GGCTAGCTACAACGA CCGCTCAC | 3821 |
| 740 | GAGCGGGC G UCGGGGGC | 1494 | GCCCCCGA GGCTAGCTACAACGA GCCCGCTC | 3822 |
| 747 | CGUCGGGG G CUGCGGCG | 1495 | CGCCGCAG GGCTAGCTACAACGA CCCCGACG | 3823 |
| 750 | CGGGGGCU G CGGCGGGC | 1496 | GCCCGCCG GGCTAGCTACAACGA AGCCCCCG | 3824 |
| 753 | GGGCUGCG G CGGGCGGG | 1497 | CCCGCCCG GGCTAGCTACAACGA CGCAGCCC | 3825 |
| 757 | UGCGGCGG G CGGGGGCC | 1498 | GGCCCCCG GGCTAGCTACAACGA CCGCCGCA | 3826 |
| 763 | GGGCGGGG G CCCCUUCC | 1499 | GGAAGGGG GGCTAGCTACAACGA CCCCGCCC | 3827 |
| 780 | UCCCUGGG G CCUGCGGG | 1500 | CCCGCAGG GGCTAGCTACAACGA CCCAGGGA | 3828 |
| 784 | UGGGGCCU G CGGGAAUC | 1501 | GATTCCCG GGCTAGCTACAACGA AGGCCCCA | 3829 |
| 790 | CUGCGGGA A UCCGGGCC | 1502 | GGCCCGGA GGCTAGCTACAACGA TCCCGCAG | 3830 |
| 796 | GAAUCCGG G CCCCACCC | 1503 | GGGTGGGG GGCTAGCTACAACGA CCGGATTC | 3831 |
| 801 | CGGGCCCC A CCCGUGGC | 1504 | GCCACGGG GGCTAGCTACAACGA GGGGCCCG | 3832 |
| 805 | CCCCACCC G UGGCCUCG | 1505 | CGAGGCCA GGCTAGCTACAACGA GGGTGGGG | 3833 |
| 808 | CACCCGUG G CCUCGCGC | 1506 | GCGCGAGG GGCTAGCTACAACGA CACGGGTG | 3834 |
| 813 | GUGGCCUC G CGCUGGGC | 1507 | GCCCAGCG GGCTAGCTACAACGA GAGGCCAC | 3835 |
| 815 | GGCCUCGC G CUGGGCAC | 1508 | GTGCCCAG GGCTAGCTACAACGA GCGAGGCC | 3836 |
| 820 | CGCGCUGG G CACGGUCC | 1509 | GGACCGTG GGCTAGCTACAACGA CCAGCGCG | 3837 |
| 822 | CGCUGGGC A CGGUCCCC | 1510 | GGGGACCG GGCTAGCTACAACGA GCCCAGCG | 3838 |
| 825 | UGGGCACG G UCCCCACG | 1511 | CGTGGGGA GGCTAGCTACAACGA CGTGCCCA | 3839 |
| 831 | CGGUCCCC A CGCCGGCG | 1512 | CGCCGGCG GGCTAGCTACAACGA GGGGACCG | 3840 |
| 833 | GUCCCCAC G CCGGCGUA | 1513 | TACGCCGG GGCTAGCTACAACGA GTGGGGAC | 3841 |
| 837 | CCACGCCG G CGUACCCG | 1514 | CGGGTACG GGCTAGCTACAACGA CGGCGTGG | 3842 |
| 839 | ACGCCGGC G UACCCGGG | 1515 | CCCGGGTA GGCTAGCTACAACGA GCCGGCGT | 3843 |
| 841 | GCCGGCGU A CCCGGGAG | 1516 | CTCCCGGG GGCTAGCTACAACGA ACGCCGGC | 3844 |
| 849 | ACCCGGGA G CCUCGGGC | 1517 | GCCCGAGG GGCTAGCTACAACGA TCCCGGGT | 3845 |
| 856 | AGCCUCGG G CCCGGCGC | 1518 | GCGCCGGG GGCTAGCTACAACGA CCGAGGCT | 3846 |
| 861 | CGGGCCCG G CGCCCUCA | 1519 | TGAGGGCG GGCTAGCTACAACGA CGGGCCCG | 3847 |
| 863 | GGCCCGGC G CCCUCACA | 1520 | TGTGAGGG GGCTAGCTACAACGA GCCGGGCC | 3848 |
| 869 | GCGCCCUC A CACCCGGG | 1521 | CCCGGGTG GGCTAGCTACAACGA GAGGGCGC | 3849 |
| 871 | GCCCUCAC A CCCGGGGG | 1522 | CCCCCGGG GGCTAGCTACAACGA GTGAGGGC | 3850 |
| 879 | ACCCGGGG G CGUCUGGG | 1523 | CCCAGACG GGCTAGCTACAACGA CCCCGGGT | 3851 |
| 881 | CCGGGGGC G UCUGGGAG | 1524 | CTCCCAGA GGCTAGCTACAACGA GCCCCCGG | 3852 |
| 893 | GGGAGGAG G CGGCCGCG | 1525 | CGCGGCCG GGCTAGCTACAACGA CTCCTCCC | 3853 |
| 896 | AGGAGGCG G CCGCGGCC | 1526 | GGCCGCGG GGCTAGCTACAACGA CGCCTCCT | 3854 |
| 899 | AGGCGGCC G CGGCCACG | 1527 | CGTGGCCG GGCTAGCTACAACGA GGCCGCCT | 3855 |
| 902 | CGGCCGCG G CCACGGCA | 1528 | TGCCGTGG GGCTAGCTACAACGA CGCGGCCG | 3856 |
| 905 | CCGCGGCC A CGGCACGC | 1529 | GCGTGCCG GGCTAGCTACAACGA GGCCGCGG | 3857 |
| 908 | CGGCCACG G CACGCCCG | 1530 | CGGGCGTG GGCTAGCTACAACGA CGTGGCCG | 3858 |
| 910 | GCCACGGC A CGCCCGGG | 1531 | CCCGGGCG GGCTAGCTACAACGA GCCGTGGC | 3859 |
| 912 | CACGGCAC G CCCGGGCA | 1532 | TGCCCGGG GGCTAGCTACAACGA GTGCCGTG | 3860 |
| 918 | ACGCCCGG G CACCCCCG | 1533 | CGGGGGTG GGCTAGCTACAACGA CCGGGCGT | 3861 |
| 920 | GCCCGGGC A CCCCCGAU | 1534 | ATCGGGGG GGCTAGCTACAACGA GCCCGGGC | 3862 |
| 927 | CACCCCCG A UUCAGCAU | 1535 | ATGCTGAA GGCTAGCTACAACGA CGGGGGTG | 3863 |
| 932 | CCGAUUCA G CAUCACAG | 1536 | CTGTGATG GGCTAGCTACAACGA TGAATCGG | 3864 |
| 934 | GAUUCAGC A UCACAGGU | 1537 | ACCTGTGA GGCTAGCTACAACGA GCTGAATC | 3865 |
| 937 | UCAGCAUC A CAGGUCGC | 1538 | GCGACCTG GGCTAGCTACAACGA GATGCTGA | 3866 |
| 941 | CAUCACAG G UCGCGGAC | 1539 | GTCCGCGA GGCTAGCTACAACGA CTGTGATG | 3867 |
| 944 | CACAGGUC G CGGACCAG | 1540 | CTGGTCCG GGCTAGCTACAACGA GACCTGTG | 3868 |
| 948 | GGUCGCGG A CCAGGCCG | 1541 | CGGCCTGG GGCTAGCTACAACGA CCGCGACC | 3869 |
| 953 | CGGACCAG G CCGGGGGC | 1542 | GCCCCCGG GGCTAGCTACAACGA CTGGTCCG | 3870 |
| 960 | GGCCGGGG G CCUCAGCC | 1543 | GGCTGAGG GGCTAGCTACAACGA CCCCGGCC | 3871 |
| 966 | GGGCCUCA G CCCCAGUG | 1544 | CACTGGGG GGCTAGCTACAACGA TGAGGCCC | 3872 |
| 972 | CAGCCCCA G UGCCUUUU | 1545 | AAAAGGCA GGCTAGCTACAACGA TGGGGCTG | 3873 |
| 974 | GCCCCAGU G CCUUUUCC | 1546 | GGAAAAGG GGCTAGCTACAACGA ACTGGGGC | 3874 |
| 991 | CUCUCCGG G UCUCCCGC | 1547 | GCGGGAGA GGCTAGCTACAACGA CCGGAGAG | 3875 |
| 998 | GGUCUCCC G CGCCGCUU | 1548 | AAGCGGCG GGCTAGCTACAACGA GGGAGACC | 3876 |
| 1000 | UCUCCCGC G CCGCUUCU | 1549 | ACAAGCGG GGCTAGCTACAACCA GCGGGAGA | 3877 |
| 1003 | CCCGCCCC G CUUCUCGG | 1550 | CCGAGAAG GGCTAGCTACAACGA GGCGCGGG | 3878 |
| 1011 | GCUUCUCG G CCCCUUCC | 1551 | GGAAGGCG GGCTAGCTACAACGA CGAGAAGC | 3879 |
| 1021 | CCCUUCCU G UCGCUCAG | 1552 | CTCAGCGA GGCTAGCTACAACGA AGGAAGGG | 3880 |
| 1024 | UUCCUGUC G CUCAGUCC | 1553 | GGACTGAG GGCTAGCTACAACGA GACAGGAA | 3881 |
| 1029 | GUCGCUCA G UCCCUGCU | 1554 | AGCAGGGA GGCTAGCTACAACGA TGAGCGAC | 3882 |
| 1035 | CAGUCCCU G CUUCCCAG | 1555 | CTGGGAAG GGCTAGCTACAACGA AGGCACTG | 3883 |
| 1046 | UCCCAGGA G CUCCUCUG | 1556 | CAGAGGAG GGCTAGCTACAACGA TCCTGGGA | 3884 |
| 1054 | GCUCCUCU G UCUUCUCC | 1557 | GCAGAAGA GGCTAGCTACAACGA AGAGGAGC | 3885 |
| 1064 | CUUCUCCA G CUUUCUGU | 1558 | ACAGAAAG GGCTAGCTACAACGA TGGAGAAG | 3886 |
| 1071 | AGCUUUCU G UGGCUGAA | 1559 | TTCAGCCA GGCTAGCTACAACGA AGAAAGCT | 3887 |
| 1074 | UUUCUGUG G CUGAAAGA | 1560 | TCTTTCAG GGCTAGCTACAACGA CACAGAAA | 3888 |
| 1082 | GCUGAAAG A UGCCCCCG | 1561 | CGGGGGCA GGCTAGCTACAACGA CTTTCAGC | 3889 |
| 1084 | UGAAAGAU G CCCCCGGU | 1562 | ACCGGGGG GGCTAGCTACAACGA ATCTTTCA | 3890 |
| 1091 | UGCCCCCG G UUCCCCGC | 1563 | GCGGGGAA GGCTAGCTACAACGA CGGGGGCA | 3891 |
| 1098 | GGUUCCCC G CCGGGGGU | 1564 | ACCCCCGG GGCTAGCTACAACGA GGGGAACC | 3892 |
| 1105 | CGCCGGGG G UGCGGGGC | 1565 | GCCCCGCA GGCTAGCTACAACGA CCCCGGCG | 3893 |
| 1107 | CCGGGGGU G CGGGGCGC | 1566 | GCGCCCCG GGCTAGCTACAACGA ACCCCCGG | 3894 |
| 1112 | GGUGCGGG G CGCUGCCC | 1567 | GGGCAGCG GGCTAGCTACAACGA CCCGCACC | 3895 |
| 1114 | UGCGGGGC G CUGCCCGG | 1568 | CCGGGCAG GGCTAGCTACAACGA GCCCCGCA | 3896 |
| 1117 | GGGGCGCU G CCCGGGUC | 1569 | GACCCGGG GGCTAGCTACAACGA AGCGCCCC | 3897 |
| 1123 | CUGCCCGG G UCUGCCCU | 1570 | AGGGCAGA GGCTAGCTACAACGA CCGGGCAG | 3898 |
| 1127 | CCGGGUCU G CCCUCCCC | 1571 | GGGGAGGG GGCTAGCTACAACGA AGACCCGG | 3899 |
| 1139 | UCCCCUCG G CGGCGCCU | 1572 | AGGCGCCG GGCTAGCTACAACGA CGAGGGGA | 3900 |
| 1142 | CCUCGGCG G CGCCUAGU | 1573 | ACTAGGCG GGCTAGCTACAACGA CGCCGAGG | 3901 |
| 1144 | UCGGCGGC G CCUAGUAC | 1574 | GTACTAGG GGCTAGCTACAACGA GCCGCCGA | 3902 |
| 1149 | GGCGCCUA G UACGCAGU | 1575 | ACTGCGTA GGCTAGCTACAACGA TAGGCGCC | 3903 |
| 1151 | CGCCUAGU A CGCAGUAG | 1576 | CTACTGCG GGCTAGCTACAACGA ACTAGGCG | 3904 |
| 1153 | CCUAGUAC G CAGUAGGC | 1577 | GCCTACTG GGCTAGCTACAACGA GTACTAGG | 3905 |
| 1156 | AGUACGCA G UAGGCGCU | 1578 | AGCGCCTA GGCTAGCTACAACGA TGCGTACT | 3906 |
| 1160 | CGCAGUAG G CGCUCAGC | 1579 | GCTGAGCG GGCTAGCTACAACGA CTACTGCG | 3907 |
| 1162 | CAGUAGGC G CUCAGCAA | 1580 | TTGCTGAG GGCTAGCTACAACGA GCCTACTG | 3908 |
| 1167 | GGCGCUCA G CAAAUACU | 1581 | AGTATTTG GGCTAGCTACAACGA TGAGCGCC | 3909 |
| 1171 | CUCAGCAA A UACUUCUC | 1582 | GACAAGTA GGCTACCTACAACGA TTGCTGAG | 3910 |
| 1173 | CAGCAAAU A CUUGUCGG | 1583 | CCGACAAG GGCTAGCTACAACGA ATTTGCTG | 3911 |
| 1177 | AAAUACUU G UCGGAGGC | 1584 | GCCTCCGA GGCTAGCTACAACGA AAGTATTT | 3912 |
| 1184 | UCUCGGAG G CACCAGCG | 1585 | CGCTGGTG GGCTAGCTACAACGA CTCCGACA | 3913 |
| 1186 | UCGGAGGC A CCAGCGCC | 1586 | GGCGCTGG GGCTAGCTACAACGA GCCTCCGA | 3914 |
| 1190 | AGGCACCA G CGCCGCGG | 1587 | CCGCGGCG GGCTAGCTACAACGA TGGTGCCT | 3915 |
| 1192 | GCACCAGC G CCGCGGGG | 1588 | CCCCGCGG GGCTAGCTACAACGA GCTGGTGC | 3916 |
| 1195 | CCAGCGCC G CGGGGCCU | 1589 | AGGCCCCG GGCTAGCTACAACGA GGCGCTGG | 3917 |
| 1200 | GCCGCGGG G CCUGCAGG | 1590 | CCTGCAGG GGCTAGCTACAACGA CCCGCGGC | 3918 |
| 1204 | CGGGGCCU G CAGGCUGG | 1591 | CCAGCCTG GGCTAGCTACAACGA AGGCCCCG | 3919 |
| 1208 | GCCUGCAG G CUGGCACU | 1592 | AGTGCCAG GGCTAGCTACAACGA CTGCAGGC | 3920 |
| 1212 | GCAGGCUG G CACUAGCC | 1593 | GGCTAGTG GGCTAGCTACAACGA CAGCCTGC | 3921 |
| 1214 | AGGCUGGC A CUAGCCUG | 1594 | CAGGCTAG GGCTAGCTACAACGA GCCAGCCT | 3922 |
| 1218 | UGGCACUA G CCUGCCCG | 1595 | CGGGCAGG GGCTAGCTACAACGA TAGTGCCA | 3923 |
| 1222 | ACUAGCCU G CCCGGGCA | 1596 | TGCCCGGG GGCTAGCTACAACGA AGGCTAGT | 3924 |
| 1228 | CUGCCCGG G CACGCCGU | 1597 | ACGGCGTG GGCTAGCTACAACGA CCGGGCAG | 3925 |
| 1230 | GCCCGGGC A CGCCGUGG | 1598 | CCACGGCG GGCTAGCTACAACGA GCCCGGGC | 3926 |
| 1232 | CCGGGCAC G CCGUGGCG | 1599 | CGCCACGG GGCTAGCTACAACGA GTGCCCGG | 3927 |
| 1235 | GGCACGCC G UGGCGCGC | 1600 | GCGCGCCA GGCTAGCTACAACGA GGCGTGCC | 3928 |
| 1238 | ACGCCGUG G CGCGCUCC | 1601 | GGAGCGCG GGCTAGCTACAACGA CACGGCGT | 3929 |
| 1240 | GCCGUGGC G CGCUCCGC | 1602 | GCGGAGCG GGCTAGCTACAACGA GCCACGGC | 3930 |
| 1242 | CGUGGCGC G CUCCGCCG | 1603 | CGGCGGAG GGCTAGCTACAACGA GCGCCACG | 3931 |
| 1247 | CGCGCUCC G CCGUGGCC | 1604 | GGCCACGG GGCTAGCTACAACGA GGAGCGCG | 3932 |
| 1250 | GCUCCGCC G UGGCCAGA | 1605 | TCTGGCCA GGCTAGCTACAACGA GGCGGAGC | 3933 |
| 1253 | CCGCCGUG G CCAGACCU | 1606 | AGGTCTGG GGCTAGCTACAACGA CACGGCGG | 3934 |
| 1258 | GUGGCCAG A CCUGUUCU | 1607 | AGAACAGG GGCTAGCTACAACGA CTGGCCAC | 3935 |
| 1262 | CCAGACCU G UUCUGGAG | 1608 | CTCCAGAA GGCTAGCTACAACGA AGGTCTGG | 3936 |
| 1272 | UCUGGAGG A CGGUAACC | 1609 | GGTTACCG GGCTAGCTACAACGA CCTCCAGA | 3937 |
| 1275 | GGAGGACG G UAACCUCA | 1610 | TGAGGTTA GGCTAGCTACAACGA CGTCCTCC | 3938 |
| 1278 | GGACGGUA A CCUCAGCC | 1611 | GGCTGAGG GGCTAGCTACAACGA TACCGTCC | 3939 |
| 1284 | UAACCUCA G CCCUCGGG | 1612 | CCCGAGGG GGCTAGCTACAACGA TGAGGTTA | 3940 |
| 1292 | GCCCUCGG G CGCCUCCC | 1613 | GGGAGGCG GGCTAGCTACAACGA CCGAGGGC | 3941 |
| 1294 | CCUCGGGC G CCUCCCUU | 1614 | AAGGGAGG GGCTAGCTACAACGA GCCCGAGG | 3942 |
| 1305 | UCCCUUUA G CCUUUCUG | 1615 | CAGAAAGG GGCTAGCTACAACGA TAAAGGGA | 3943 |
| 1313 | GCCUUUCU G CCGACCCA | 1616 | TGGGTCGG GGCTAGCTACAACGA AGAAAGGC | 3944 |
| 1317 | UUCUGCCG A CCCAGCAG | 1617 | CTGCTGGG GGCTAGCTACAACGA CGGCAGAA | 3945 |
| 1322 | CCGACCCA G CAGCUUCU | 1618 | AGAAGCTG GGCTAGCTACAACGA TGGGTCGG | 3946 |
| 1325 | ACCCAGCA G CUUCUAAU | 1619 | ATTAGAAG GGCTAGCTACAACGA TGCTGGGT | 3947 |
| 1332 | AGCUUCUA A UUUGGGUG | 1620 | CACCCAAA GGCTAGCTACAACGA TAGAAGCT | 3948 |
| 1338 | UAAUUUGG G UGCGUGGU | 1621 | ACCACGCA GGCTAGCTACAACGA CCAAATTA | 3949 |
| 1340 | AUUUGGGU G CGUGGUUG | 1622 | CAACCACG GGCTAGCTACAACGA ACCCAAAT | 3950 |
| 1342 | UUGGGUGC G UGGUUGAG | 1623 | CTCAACCA GGCTAGCTACAACGA GCACCCAA | 3951 |
| 1345 | GGUGCGUG G UUGAGAGC | 1624 | GCTCTCAA GGCTAGCTACAACGA CACGCACC | 3952 |
| 1352 | GGUUGAGA G CGCUCAGC | 1625 | GCTGAGCG GGCTAGCTACAACGA TCTCAACC | 3953 |
| 1354 | UUGAGAGC G CUCAGCUG | 1626 | CAGCTGAG GGCTAGCTACAACGA GCTCTCAA | 3954 |
| 1359 | AGCGCUCA G CUGUCAGC | 1627 | GCTGACAG GGCTAGCTACAACGA TGAGCGCT | 3955 |
| 1362 | GCUCAGCU G UCAGCCCU | 1628 | AGGGCTGA GGCTAGCTACAACGA AGCTGAGC | 3956 |
| 1366 | AGCUGUCA G CCCUGCCU | 1629 | AGGCAGGG GGCTAGCTACAACGA TGACAGCT | 3957 |
| 1371 | UCAGCCCU G CCUUUGAG | 1630 | CTCAAAGG GGCTAGCTACAACGA AGGGCTGA | 3958 |
| 1381 | CUUUGAGG G CUGGGUCC | 1631 | GGACCCAG GGCTAGCTACAACGA CCTCAAAG | 3959 |
| 1386 | AGGGCUGG G UCCCUUUU | 1632 | AAAAGGGA GGCTAGCTACAACGA CCAGCCCT | 3960 |
| 1398 | CUUUUCCC A UCACUGGG | 1633 | CCCAGTGA GGCTAGCTACAACGA GGGAAAAG | 3961 |
| 1401 | UUCCCAUC A CUGGGUCA | 1634 | TGACCCAG GGCTAGCTACAACGA GATGGGAA | 3962 |
| 1406 | AUCACUGG G UCAUUAAG | 1635 | CTTAATGA GGCTAGCTACAACGA CCAGTGAT | 3963 |
| 1409 | ACUGGGUC A UUAAGAGC | 1636 | GCTCTTAA GGCTAGCTACAACGA GACCCAGT | 3964 |
| 1416 | CAUUAAGA G CAAGUGGG | 1637 | CCCACTTG GGCTAGCTACAACCA TCTTAATG | 3965 |
| 1420 | AAGAGCAA G UGGGGGCG | 1638 | CGCCCCCA GGCTAGCTACAACGA TTGCTCTT | 3966 |
| 1426 | AAGUGGGG G CGAGGCGA | 1639 | TCGCCTCG GGCTAGCTACAACGA CCCCACTT | 3967 |
| 1431 | GGGGCGAG G CGACAGCC | 1640 | GGCTGTCG GGCTAGCTACAACGA CTCGCCCC | 3968 |
| 1434 | GCGAGGCG A CAGCCCUC | 1641 | GAGGGCTG GGCTAGCTACAACGA CGCCTCGC | 3969 |
| 1437 | AGGCGACA G CCCUCCCG | 1642 | CGGGAGGG GGCTAGCTACAACGA TGTCGCCT | 3970 |
| 1445 | GCCCUCCC G CACGCUGG | 1643 | CCAGCGTG GGCTAGCTACAACGA GGGAGGGC | 3971 |
| 1447 | CCUCCCGC A CGCUGGGU | 1644 | ACCCAGCG GGCTAGCTACAACGA GCGGGAGG | 3972 |
| 1449 | UCCCGCAC G CUGGGUUG | 1645 | CAACCCAG GGCTAGCTACAACGA GTGCGGGA | 3973 |
| 1454 | CACGCUGG G UUGCAGCU | 1646 | AGCTGCAA GGCTAGCTACAACGA CCAGCGTG | 3974 |
| 1457 | GCUGGGUU G CAGCUGCA | 1647 | TGCAGCTG GGCTAGCTACAACGA AACCCAGC | 3975 |
| 1460 | GGGUUGCA G CUGCACAG | 1648 | CTGTGCAG GGCTAGCTACAACGA TGCAACCC | 3976 |
| 1463 | UUGCAGCU G CACAGGUA | 1649 | TACCTGTG GGCTAGCTACAACGA AGCTGCAA | 3977 |
| 1465 | GCAGCUGC A CAGGUAGG | 1650 | CCTACCTG GGCTAGCTACAACGA GCAGCTGC | 3978 |
| 1469 | CUGCACAG G UAGGCACG | 1651 | CGTGCCTA GGCTAGCTACAACGA CTGTGCAG | 3979 |
| 1473 | ACAGGUAG G CACGCUGC | 1652 | CCAGCGTG GGCTAGCTACAACGA CTACCTGT | 3980 |
| 1475 | AGGUAGGC A CGCUGCAG | 1653 | CTGCAGCG GGCTAGCTACAACGA GCCTACCT | 3981 |
| 1477 | GUAGGCAC G CUGCAGUC | 1654 | GACTGCAG GGCTAGCTACAACGA GTGCCTAC | 3982 |
| 1480 | GGCACGCU G CAGUCCUU | 1655 | AAGGACTG GGCTAGCTACAACGA AGCGTGCC | 3983 |
| 1483 | ACGCUGCA G UCCUUGCU | 1656 | AGCAAGGA GGCTAGCTACAACGA TGCAGCGT | 3984 |
| 1489 | CAGUCCUU G CUGCCUGG | 1657 | CCAGGCAG GGCTAGCTACAACGA AAGGACTG | 3985 |
| 1492 | UCCUUGCU G CCUGGCGU | 1658 | ACGCCAGG GGCTAGCTACAACGA AGCAAGGA | 3986 |
| 1497 | GCUGCCUG G CGUUGGGG | 1659 | CCCCAACG GGCTAGCTACAACGA CAGGCAGC | 3987 |
| 1499 | UGCCUGGC G UUGGGGCC | 1660 | GGCCCCAA GGCTAGCTACAACGA GCCAGGCA | 3988 |
| 1505 | GCGUUGGG G CCCAGGGA | 1661 | TCCCTGGG GGCTAGCTACAACGA CCCAACGC | 3989 |
| 1513 | GCCCAGGG A CCGCUGUG | 1662 | CACAGCGG GGCTAGCTACAACGA CCCTGGGC | 3990 |
| 1516 | CAGGGACC G CUGUGGGU | 1663 | ACCCACAG GGCTAGCTACAACGA GGTCCCTG | 3991 |
| 1519 | GGACCGCU G UGGGUUUG | 1664 | CAAACCCA GGCTAGCTACAACGA AGCGGTCC | 3992 |
| 1523 | CGCUGUGG G UUUGCCCU | 1665 | AGGGCAAA GGCTAGCTACAACGA CCACAGCG | 3993 |
| 1527 | GUGGGUUU G CCCUUCAG | 1666 | CTGAAGGG GGCTAGCTACAACGA AAACCCAC | 3994 |
| 1536 | CCCUUCAG A UGGCCCUG | 1667 | CAGGGCCA GGCTAGCTACAACGA CTGAAGGG | 3995 |
| 1539 | UUCAGAUG G CCCUGCCA | 1668 | TGGCAGGG GGCTAGCTACAACGA CATCTGAA | 3996 |
| 1544 | AUGGCCCU G CCAGCAGC | 1669 | GCTGCTGG GGCTAGCTACAACGA AGGGCCAT | 3997 |
| 1548 | CCCUGCCA G CAGCUGCC | 1670 | GGCAGCTG GGCTAGCTACAACGA TGGCAGGG | 3998 |
| 1551 | UGCCAGCA G CUGCCCUG | 1671 | CAGGGCAG GGCTAGCTACAACGA TGCTGGCA | 3999 |
| 1554 | CAGCAGCU G CCCUGUGG | 1672 | CCACAGGG GGCTAGCTACAACGA AGCTGCTG | 4000 |
| 1559 | GCUGCCCU G UGGGGCCU | 1673 | AGGCCCCA GGCTAGCTACAACGA AGGGCAGC | 4001 |
| 1564 | CCUGUGGG G CCUGGGGC | 1674 | GCCCCAGG GGCTAGCTACAACGA CCCACAGG | 4002 |
| 1571 | GGCCUGGG G CUGGGCCU | 1675 | AGGCCCAG GGCTAGCTACAACGA CCCAGGCC | 4003 |
| 1576 | GGGGCUGG G CCUGGGCC | 1676 | GGCCCAGG GGCTAGCTACAACGA CCAGCCCC | 4004 |
| 1582 | GGGCCUGG G CCUGGCUG | 1677 | CAGCCAGG GGCTAGCTACAACGA CCAGGCCC | 4005 |
| 1587 | UGGGCCUG G CUGACCAG | 1678 | CTGCTCAG GGCTAGCTACAACGA CAGGCCCA | 4006 |
| 1592 | CUGGCUGA G CAGGGCCC | 1679 | GGGCCCTG GGCTAGCTACAACGA TCAGCCAG | 4007 |
| 1597 | UGAGCAGG G CCCUCCUU | 1680 | AAGGAGGG GGCTAGCTACAACGA CCTGCTCA | 4008 |
| 1607 | CCUCCUUG G CAGGUGGG | 1681 | CCCACCTG GGCTACCTACAACGA CAAGGAGG | 4009 |
| 1611 | CUUCGCAG G UGGGGCAG | 1682 | CTGCCCCA GGCTAGCTACAACGA CTGCCAAG | 4010 |
| 1616 | CAGGUGGG G CAGGAGAC | 1683 | GTCTCCTG GGCTAGCTACAACGA CCCACCTG | 4011 |
| 1623 | GGCAGGAG A CCCUGUAG | 1684 | CTACAGGG GGCTAGCTACAACGA CTCCTGCC | 4012 |
| 1628 | GAGACCCU G UAGGAGGA | 1685 | TCCTCCTA GGCTAGCTACAACGA AGGGTCTC | 4013 |
| 1636 | GUAGGAGG A CCCCGGGC | 1686 | GCCCGGGG GGCTAGCTACAACGA CCTCCTAC | 4014 |
| 1643 | GACCCCGG G CCGCAGGC | 1687 | GCCTGCGG GGCTAGCTACAACGA CCGGGGTC | 4015 |
| 1646 | CCCGGGCC G CAGGCCCC | 1688 | GGGGCCTG GGCTAGCTACAACGA GGCCCGGG | 4016 |
| 1650 | GGCCGCAG G CCCCUGAG | 1689 | CTCAGGGG GGCTAGCTACAACGA CTGCGGCC | 4017 |
| 1661 | CCUGAGCA G CGAUGACG | 1690 | CGTCATCG GGCTAGCTACAACGA TCCTCAGG | 4018 |
| 1664 | GAGGAGCG A UGACGGAA | 1691 | TTCCGTCA GGCTAGCTACAACGA CGCTCCTC | 4019 |
| 1667 | GAGCGAUG A CGGAAUAU | 1692 | ATATTCCG GGCTAGCTACAACGA CATCGCTC | 4020 |
| 1672 | AUGACGGA A UAUAAGCU | 1693 | AGCTTATA GGCTAGCTACAACGA TCCGTCAT | 4021 |
| 1674 | GACGGAAU A UAAGCUGG | 1694 | CCAGCTTA GGCTAGCTACAACGA ATTCCGTC | 4022 |
| 1678 | GAAUAUAA G CUGGUGGU | 1695 | ACCACCAG GGCTAGCTACAACGA TTATATTC | 4023 |
| 1682 | AUAAGCUG G UGGUGGUG | 1696 | CACCACCA GGCTAGCTACAACGA CAGCTTAT | 4024 |
| 1685 | AGCUGGUG G UGGUGGGC | 1697 | GCCCACCA GGCTAGCTACAACGA CACCAGCT | 4025 |
| 1688 | UGGUGGUG G UGGGCGCC | 1698 | GGCGCCCA GGCTAGCTACAACGA CACCACCA | 4026 |
| 1692 | GGUGGUGG G CGCCGGCG | 1699 | CGCCGGCG GGCTAGCTACAACGA CCACCACC | 4027 |
| 1694 | UGGUGGGC G CCGGCGGU | 1700 | ACCGCCGG GGCTAGCTACAACGA GCCCACCA | 4028 |
| 1698 | GGGCGCCG G CGGUGUGG | 1701 | CCACACCG GGCTAGCTACAACCA CGGCGCCC | 4029 |
| 1701 | CGCCGGCG G UGUGGGCA | 1702 | TGCCCACA GGCTAGCTACAACGA CGCCGGCG | 4030 |
| 1703 | CCGGCGGU G UGGGCAAG | 1703 | CTTGCCCA GGCTAGCTACAACGA ACCGCCGG | 4031 |
| 1707 | CGGUGUGG G CAAGAGUG | 1704 | CACTCTTG GGCTAGCTACAACGA CCACACCG | 4032 |
| 1713 | GGGCAAGA G UGCGCUGA | 1705 | TCAGCGCA GGCTAGCTACAACGA TCTTGCCC | 4033 |
| 1715 | GCAAGAGU G CGCUGACC | 1706 | GGTCAGCG GGCTAGCTACAACGA ACTCTTGC | 4034 |
| 1717 | AAGAGUGC G CUGACCAU | 1707 | ATGGTCAG GGCTAGCTACAACGA GCACTCTT | 4035 |
| 1721 | GUGCGCUG A CCAUCCAG | 1708 | CTGGATGG GGCTAGCTACAACGA CAGCGCAC | 4036 |
| 1724 | CGCUGACC A UCCAGCUG | 1709 | CAGCTGGA GGCTAGCTACAACGA GGTCAGCG | 4037 |
| 1729 | ACCAUCCA G CUGAUCCA | 1710 | TGGATCAG GGCTAGCTACAACGA TGGATGGT | 4038 |
| 1733 | UCCAGCUG A UCCAGAAC | 1711 | GTTCTGGA GGCTAGCTACAACGA CAGCTGGA | 4039 |
| 1740 | GAUCCAGA A CCAUUUUG | 1712 | CAAAATGG GGCTAGCTACAACGA TCTGGATC | 4040 |
| 1743 | CCAGAACC A UUUUGUGG | 1713 | CCACAAAA GGCTAGCTACAACGA GGTTCTGG | 4041 |
| 1748 | ACCAUUUU G UGGACGAA | 1714 | TTCGTCCA GGCTAGCTACAACGA AAAATGGT | 4042 |
| 1752 | UUUUGUGG A CGAAUACG | 1715 | CGTATTCG GGCTAGCTACAACGA CCACAAAA | 4043 |
| 1756 | GUGGACGA A UACGACCC | 1716 | GGGTCGTA GGCTAGCTACAACGA TCGTCCAC | 4044 |
| 1758 | GGACGAAU A CGACCCCA | 1717 | TGGGGTCG GGCTAGCTACAACGA ATTCGTCC | 4045 |
| 1761 | CGAAUACG A CCCCACUA | 1718 | TAGTGGGG GGCTAGCTACAACGA CGTATTCG | 4046 |
| 1766 | ACGACCCC A CUAUAGAG | 1719 | CTCTATAG GGCTAGCTACAACGA GGGGTCGT | 4047 |
| 1769 | ACCCCACU A UAGAGGAU | 1720 | ATCCTCTA GGCTAGCTACAACGA AGTGGGGT | 4048 |
| 1776 | UAUAGAGG A UUCCUACC | 1721 | GGTAGGAA GGCTAGCTACAACGA CCTCTATA | 4049 |
| 1782 | GGAUUCCU A CCGGAAGC | 1722 | GCTTCCGG GGCTAGCTACAACGA AGGAATCC | 4050 |
| 1789 | UACCGGAA G CAGGUGGU | 1723 | ACCACCTG GGCTAGCTACAACGA TTCCGGTA | 4051 |
| 1793 | GGAAGCAG G UGGUCAUU | 1724 | AATGACCA GGCTAGCTACAACGA CTGCTTCC | 4052 |
| 1796 | AGCAGGUG G UCAUUGAU | 1725 | ATCAATGA GGCTAGCTACAACGA CACCTGCT | 4053 |
| 1799 | AGGUGGUC A UUGAUGGG | 1726 | CCCATCAA GGCTAGCTACAACGA GACCACCT | 4054 |
| 1803 | GGUCAUUG A UGGGGAGA | 1727 | TCTCCCCA GGCTAGCTACAACGA CAATGACC | 4055 |
| 1811 | AUGGGGAG A CGUGCCUG | 1728 | CAGGCACG GGCTAGCTACAACGA CTCCCCAT | 4056 |
| 1813 | GGGGAGAC G UGCCUGUU | 1729 | AACAGGCA GGCTAGCTACAACGA GTCTCCCC | 4057 |
| 1815 | GGAGACGU G CCUGUUGG | 1730 | CCAACAGG GGCTAGCTACAACGA ACGTCTCC | 4058 |
| 1819 | ACGUGCCU G UUGGACAU | 1731 | ATGTCCAA GGCTAGCTACAACGA AGGCACGT | 4059 |
| 1824 | CCUGUUGG A CAUCCUGG | 1732 | CCAGGATG GGCTAGCTACAACGA CCAACAGG | 4060 |
| 1826 | UGUUGGAC A UCCUGGAU | 1733 | ATCCAGGA GGCTAGCTACAACGA GTCCAACA | 4061 |
| 1833 | CAUCCUGG A UACCGCCG | 1734 | CGGCGGTA GGCTAGCTACAACGA CCAGGATG | 4062 |
| 1835 | UCCUGGAU A CCGCCGGC | 1735 | GCCGGCGG GGCTAGCTACAACGA ATCCAGGA | 4063 |
| 1838 | UGGAUACC G CCGGCCAG | 1736 | CTGGCCGG GGCTAGCTACAACGA GGTATCCA | 4064 |
| 1842 | UACCGCCG G CCAGGAGG | 1737 | CCTCCTGG GGCTAGCTACAACGA CGGCGGTA | 4065 |
| 1852 | CAGGAGGA G UACAGCGC | 1738 | GCGCTGTA GGCTAGCTACAACGA TCCTCCTG | 4066 |
| 1854 | GGAGGAGU A CAGCGCCA | 1739 | TGGCGCTG GGCTAGCTACAACGA ACTCCTCC | 4067 |
| 1857 | GGAGUACA G CGCCAUGC | 1740 | GCATGGCG GGCTAGCTACAACGA TGTACTCC | 4068 |
| 1859 | AGUACAGC G CCAUGCGG | 1741 | CCGCATGG GGCTAGCTACAACGA GCTGTACT | 4069 |
| 1862 | ACAGCGCC A UGCGGGAC | 1742 | GTCCCGCA GGCTAGCTACAACGA GGCGCTGT | 4070 |
| 1864 | AGCGCCAU G CGGGACCA | 1743 | TGGTCCCG GGCTAGCTACAACGA ATGGCGCT | 4071 |
| 1869 | CAUGCGGG A CCAGUACA | 1744 | TGTACTGG GGCTAGCTACAACGA CCCGCATG | 4072 |
| 1873 | CGGGACCA G UACAUGCG | 1745 | CGCATGTA GGCTAGCTACAACGA TGGTCCCG | 4073 |
| 1875 | GGACCAGU A CAUGCGCA | 1746 | TGCGCATG GGCTAGCTACAACGA ACTGGTCC | 4074 |
| 1877 | ACCAGUAC A UGCGCACC | 1747 | GGTGCGCA GGCTAGCTACAACGA GTACTGGT | 4075 |
| 1879 | CAGUACAU G CGCACCGG | 1748 | CCGGTGCG GGCTAGCTACAACGA ATGTACTG | 4076 |
| 1881 | GUACAUGC G CACCGGGG | 1749 | CCCCGGTG GGCTAGCTACAACGA GCATGTAC | 4077 |
| 1883 | ACAUGCGC A CCGGGGAG | 1750 | CTCCCCGG GGCTAGCTACAACGA GCGCATGT | 4078 |
| 1893 | CGGGGAGG G CUUCCUGU | 1751 | ACAGGAAG GGCTAGCTACAACGA CCTCCCCG | 4079 |
| 1900 | GGCUUCCU G UGUGUGUU | 1752 | AACACACA GGCTAGCTACAACGA AGGAAGCC | 4080 |
| 1902 | CUUCCUGU G UGUGUUUG | 1753 | CAAACACA GGCTAGCTACAACGA ACAGGAAG | 4081 |
| 1904 | UCCUGUGU G UGUUUGCC | 1754 | GGCAAACA GGCTAGCTACAACGA ACACAGGA | 4082 |
| 1906 | CUGUGUGU G UUUGCCAU | 1755 | ATGGCAAA GGCTAGCTACAACGA ACACACAG | 4083 |
| 1910 | GUGUGUUU G CCAUCAAC | 1756 | GTTGATGG GGCTAGCTACAACGA AAACACAC | 4084 |
| 1913 | UGUUUGCC A UCAACAAC | 1757 | GTTGTTGA GGCTAGCTACAACGA GGCAAACA | 4085 |
| 1917 | UGCCAUCA A CAACACCA | 1758 | TGGTGTTG GGCTAGCTACAACGA TGATGGCA | 4086 |
| 1920 | CAUCAACA A CACCAAGU | 1759 | ACTTGGTG GGCTAGCTACAACGA TGTTGATG | 4087 |
| 1922 | UCAACAAC A CCAAGUCU | 1760 | AGACTTGG GGCTAGCTACAACGA GTTGTTGA | 4088 |
| 1927 | AACACCAA G UCUUUUGA | 1761 | TCAAAAGA GGCTAGCTACAACGA TTGGTGTT | 4089 |
| 1938 | UUUUGAGG A CAUCCACC | 1762 | GGTGGATG GGCTAGCTACAACGA CCTCAAAA | 4090 |
| 1940 | UUGAGGAC A UCCACCAG | 1763 | CTGGTGGA GGCTAGCTACAACGA GTCCTCAA | 4091 |
| 1944 | GGACAUCC A CCAGUACA | 1764 | TGTACTGG GGCTAGCTACAACGA GGATGTCC | 4092 |
| 1948 | AUCCACCA G UACAGGGA | 1765 | TCCCTGTA GGCTAGCTACAACGA TGGTGGAT | 4093 |
| 1950 | CCACCAGU A CAGGGAGC | 1766 | GCTCCCTG GGCTAGCTACAACGA ACTGGTGG | 4094 |
| 1957 | UACAGGGA G CAGAUCAA | 1767 | TTGATCTG GGCTAGCTACAACGA TCCCTGTA | 4095 |
| 1961 | GGGAGCAG A UCAAACGG | 1768 | CCGTTTGA GGCTAGCTACAACGA CTGCTCCC | 4096 |
| 1966 | CAGAUCAA A CGGGUGAA | 1769 | TTCACCCG GGCTAGCTACAACGA TTGATCTG | 4097 |
| 1970 | UCAAACGG G UGAAGGAC | 1770 | GTCCTTCA GGCTAGCTACAACGA CCGTTTGA | 4098 |
| 1977 | GGUGAAGG A CUCGGAUG | 1771 | CATCCGAG GGCTAGCTACAACGA CCTTCACC | 4099 |
| 1983 | GGACUCGG A UGACGUGC | 1772 | GCACGTCA GGCTAGCTACAACGA CCGAGTCC | 4100 |
| 1986 | CUCGGAUG A CGUGCCCA | 1773 | TGGGCACG GGCTAGCTACAACGA CATCCGAG | 4101 |
| 1988 | CGGAUGAC G UGCCCAUG | 1774 | CATGGGCA GGCTAGCTACAACGA GTCATCCG | 4102 |
| 1990 | GAUGACGU G CCCAUGGU | 1775 | ACCATGGG GGCTAGCTACAACGA ACGTCATC | 4103 |
| 1994 | ACGUGCCC A UGGUGCUG | 1776 | CAGCACCA GGCTAGCTACAACGA GGGCACGT | 4104 |
| 1997 | UGCCCAUG G UGCUGGUG | 1777 | CACCAGCA GGCTAGCTACAACGA CATGGGCA | 4105 |
| 1999 | CCCAUGGU G CUGGUGGG | 1778 | CCCACCAG GGCTAGCTACAACGA ACCATGGG | 4106 |
| 2003 | UGGUGCUG G UGGGGAAC | 1779 | GTTCCCCA GGCTAGCTACAACGA CAGCACCA | 4107 |
| 2010 | GGUGGGGA A CAAGUGUG | 1780 | CACACTTG GGCTAGCTACAACGA TCCCCACC | 4108 |
| 2014 | GGGAACAA G UGUGACCU | 1781 | AGGTCACA GGCTAGCTACAACGA TTGTTCCC | 4109 |
| 2016 | GAACAAGU G UGACCUGG | 1782 | CCAGGTCA GGCTAGCTACAACGA ACTTGTTC | 4110 |
| 2019 | CAAGUGUG A CCUGGCUG | 1783 | CAGCCAGG GGCTAGCTACAACGA CACACTTG | 4111 |
| 2024 | GUGACCUG G CUGCACGC | 1784 | GCGTGCAG GGCTAGCTACAACGA CAGGTCAC | 4112 |
| 2027 | ACCUGGCU G CACGCACU | 1785 | AGTGCGTG GGCTAGCTACAACGA AGCCAGGT | 4113 |
| 2029 | CUGGCUGC A CGCACUGU | 1786 | ACAGTGCG GGCTAGCTACAACGA GCAGCCAG | 4114 |
| 2031 | GGCUGCAC G CACUGUGG | 1787 | CCACAGTG GGCTAGCTACAACGA GTGCAGCC | 4115 |
| 2033 | CUGCACGC A CUGUGGAA | 1788 | TTCCACAG GGCTAGCTACAACGA GCGTGCAG | 4116 |
| 2036 | CACGCACU G UGGAAUCU | 1789 | AGATTCCA GGCTAGCTACAACGA AGTGCGTG | 4117 |
| 2041 | ACUGUGGA A UCUCGGCA | 1790 | TGCCGAGA GGCTAGCTACAACGA TCCACAGT | 4118 |
| 2047 | GAAUCUCG G CAGGCUCA | 1791 | TGAGCCTG GGCTAGCTACAACGA CGAGATTC | 4119 |
| 2051 | CUCGGCAG G CUCAGGAC | 1792 | GTCCTGAG GGCTAGCTACAACGA CTGCCGAG | 4120 |
| 2058 | GGCUCAGG A CCUCGCCC | 1793 | GGGCGAGG GGCTAGCTACAACGA CCTGAGCC | 4121 |
| 2063 | AGGACCUC G CCCGAAGC | 1794 | GCTTCGGG GGCTAGCTACAACGA GAGGTCCT | 4122 |
| 2070 | CGCCCGAA G CUACGGCA | 1795 | TGCCGTAG GGCTAGCTACAACGA TTCGGGCG | 4123 |
| 2073 | CCGAAGCU A CGGCAUCC | 1796 | GGATGCCG GGCTAGCTACAACGA AGCTTCGG | 4124 |
| 2076 | AAGCUACG G CAUCCCCU | 1797 | AGGGGATG GGCTAGCTACAACGA CGTAGCTT | 4125 |
| 2078 | GCUACGGC A UCCCCUAC | 1798 | GTAGGGGA GGCTAGCTACAACGA GCCGTAGC | 4126 |
| 2085 | CAUCCCCU A CAUCGAGA | 1799 | TCTCGATG GGCTAGCTACAACGA AGGGGATG | 4127 |
| 2087 | UCCCCUAC A UCGAGACC | 1800 | GGTCTCGA GGCTAGCTACAACGA GTAGGGGA | 4128 |
| 2093 | ACAUCGAG A CCUCGGCC | 1801 | GGCCGAGG GGCTAGCTACAACGA CTCGATGT | 4129 |
| 2099 | AGACCUCG G CCAAGACC | 1802 | GGTCTTGG GGCTAGCTACAACGA CGAGGTCT | 4130 |
| 2105 | CGGCCAAG A CCCGGCAG | 1803 | CTGCCGGG GGCTAGCTACAACGA CTTGGCCG | 4131 |
| 2110 | AAGACCCG G CAGGGAGU | 1804 | ACTCCCTG GGCTAGCTACAACGA CGGGTCTT | 4132 |
| 2117 | GGCAGGGA G UGGAGGAU | 1805 | ATCCTCCA GGCTAGCTACAACGA TCCCTGCC | 4133 |
| 2124 | AGUGGAGG A UGCCUUCU | 1806 | AGAAGGCA GGCTAGCTACAACGA CCTCCACT | 4134 |
| 2126 | UGGAGGAU G CCUUCUAC | 1807 | GTAGAAGG GGCTAGCTACAACGA ATCCTCCA | 4135 |
| 2133 | UGCCUUCU A CACGUUGG | 1808 | CCAACGTG GGCTAGCTACAACGA AGAAGGCA | 4136 |
| 2135 | CCUUCUAC A CGUUGGUG | 1809 | CACCAACG GGCTAGCTACAACGA GTAGAAGG | 4137 |
| 2137 | UUCUACAC G UUGGUGCG | 1810 | CGCACCAA GGCTAGCTACAACGA GTGTAGAA | 4138 |
| 2141 | ACACGUUG G UGCGUGAG | 1811 | CTCACGCA GGCTAGCTACAACGA CAACGTGT | 4139 |
| 2143 | ACGUUGGU G CGUGAGAU | 1812 | ATCTCACG GGCTAGCTACAACGA ACCAACGT | 4140 |
| 2145 | GUUGGUGC G UGAGAUCC | 1813 | GGATCTCA GGCTAGCTACAACGA GCACCAAC | 4141 |
| 2150 | UGCGUGAG A UCCGGCAG | 1814 | CTGCCGGA GGCTAGCTACAACGA CTCACGCA | 4142 |
| 2155 | GAGAUCCG G CAGCACAA | 1815 | TTGTGCTG GGCTAGCTACAACGA CGGATCTC | 4143 |
| 2158 | AUCCGGCA G CACAAGCU | 1816 | AGCTTGTG GGCTAGCTACAACGA TGCCGGAT | 4144 |
| 2160 | CCGGCAGC A CAAGCUGC | 1817 | GCAGCTTG GGCTAGCTACAACGA GCTGCCGG | 4145 |
| 2164 | CAGCACAA G CUGCGGAA | 1818 | TTCCGCAG GGCTAGCTACAACGA TTGTGCTG | 4146 |
| 2167 | CACAAGCU G CGGAAGCU | 1819 | AGCTTCCG GGCTAGCTACAACGA AGCTTGTG | 4147 |
| 2173 | CUGCGGAA G CUGAACCC | 1820 | GGGTTCAG GGCTAGCTACAACGA TTCCGCAG | 4148 |
| 2178 | GAAGCUGA A CCCUCCUG | 1821 | CAGGAGGG GGCTAGCTACAACGA TCAGCTTC | 4149 |
| 2187 | CCCUCCUG A UGAGAGUG | 1822 | CACTCTCA GGCTAGCTACAACGA CAGGAGGG | 4150 |
| 2193 | UGAUGAGA G UGGCCCCG | 1823 | CGGGGCCA GGCTAGCTACAACGA TCTCATCA | 4151 |
| 2196 | UGAGAGUG G CCCCGGCU | 1824 | AGCCGGGG GGCTAGCTACAACGA CACTCTCA | 4152 |
| 2202 | UGGCCCCG G CUGCAUGA | 1825 | TCATGCAG GGCTAGCTACAACGA CGGGGCCA | 4153 |
| 2205 | CCCCGGCU G CAUGAGCU | 1826 | AGCTCATG GGCTAGCTACAACGA AGCCGGGG | 4154 |
| 2207 | CCGGCUGC A UGAGCUGC | 1827 | GCAGCTCA GGCTAGCTACAACGA GCAGCCGG | 4155 |
| 2211 | CUGCAUGA G CUGCAAGU | 1828 | ACTTGCAG GGCTAGCTACAACGA TCATGCAG | 4156 |
| 2214 | CAUGAGCU G CAAGUGUG | 1829 | CACACTTG GGCTAGCTACAACGA AGCTCATG | 4157 |
| 2218 | AGCUGCAA G UGUGUGCU | 1830 | AGCACACA GGCTAGCTACAACGA TTGCAGCT | 4158 |
| 2220 | CUGCAAGU G UGUGCUCU | 1831 | AGAGCACA GGCTAGCTACAACGA ACTTGCAG | 4159 |
| 2222 | GCAAGUGU G UGCUCUCC | 1832 | GGAGAGCA GGCTAGCTACAACGA ACACTTGC | 4160 |
| 2224 | AAGUGUGU G CUCUCCUG | 1833 | CAGGAGAG GGCTAGCTACAACGA ACACACTT | 4161 |
| 2233 | CUCUCCUG A CGCAGGUG | 1834 | CACCTGCG GGCTAGCTACAACGA CAGGAGAG | 4162 |
| 2235 | CUCCUGAC G CAGGUGAG | 1835 | CTCACCTG GGCTAGCTACAACGA GTCAGGAG | 4163 |
| 2239 | UGACGCAG G UGAGGGGG | 1836 | CCCCCTCA GGCTAGCTACAACGA CTGCGTCA | 4164 |
| 2248 | UGAGGGGG A CUCCCAGG | 1837 | CCTGGGAG GGCTAGCTACAACGA CCCCCTCA | 4165 |
| 2257 | CUCCCAGG G CGGCCGCC | 1838 | GGCGGCCG GGCTAGCTACAACGA CCTGGGAG | 4166 |
| 2260 | CCAGGGCG G CCGCCACG | 1839 | CGTGGCGG GGCTAGCTACAACGA CGCCCTGG | 4167 |
| 2263 | GGGCGGCC G CCACGCCC | 1840 | GGGCGTGG GGCTAGCTACAACGA GGCCGCCC | 4168 |
| 2266 | CGGCCGCC A CGCCCACC | 1841 | GGTGGGCG GGCTAGCTACAACGA GGCGGCCG | 4169 |
| 2268 | GCCGCCAC G CCCACCGG | 1842 | CCGGTGGG GGCTAGCTACAACGA GTGGCGGC | 4170 |
| 2272 | CCACGCCC A CCGGAUGA | 1843 | TCATCCGG GGCTAGCTACAACGA GGGCGTGG | 4171 |
| 2277 | CCCACCGG A UGACCCCG | 1844 | CGGGGTCA GGCTAGCTACAACGA CCGGTGGG | 4172 |
| 2280 | ACCGGAUG A CCCCGGCU | 1845 | AGCCGGGG GGCTAGCTACAACGA CATCCGGT | 4173 |
| 2286 | UGACCCCG G CUCCCCGC | 1846 | GCGGGGAG GGCTAGCTACAACGA CGGGGTCA | 4174 |
| 2293 | GGCUCCCC G CCCCUGCC | 1847 | GGCAGGGG GGCTAGCTACAACGA GGGGAGCC | 4175 |
| 2299 | CCGCCCCU G CCGGUCUC | 1848 | GAGACCGG GGCTAGCTACAACGA AGGGGCGG | 4176 |
| 2303 | CCCUGCCG G UCUCCUGG | 1849 | CCAGGAGA GGCTAGCTACAACGA CGGCAGGG | 4177 |
| 2311 | GUCUCCUG G CCUGCGGU | 1850 | ACCGCAGG GGCTAGCTACAACGA CAGGAGAC | 4178 |
| 2315 | CCUGGCCU G CGGUCAGC | 1851 | GCTGACCG GGCTAGCTACAACGA AGGCCAGG | 4179 |
| 2318 | GGCCUGCG G UCAGCAGC | 1852 | GCTGCTGA GGCTAGCTACAACGA CGCAGGCC | 4180 |
| 2322 | UGCGGUCA G CAGCCUCC | 1853 | GGAGGCTG GGCTAGCTACAACGA TGACCGCA | 4181 |
| 2325 | GGUCAGCA G CCUCCCUU | 1854 | AAGGGAGG GGCTAGCTACAACGA TGCTGACC | 4182 |
| 2334 | CCUCCCUU G UGCCCCGC | 1855 | GCGGGGCA GGCTAGCTACAACGA AAGGGAGG | 4183 |
| 2336 | UCCCUUGU G CCCCGCCC | 1856 | GGGCGGGG GGCTAGCTACAACGA ACAAGGGA | 4184 |
| 2341 | UGUGCCCC G CCCAGCAC | 1857 | GTGCTGGG GGCTAGCTACAACGA GGGGCACA | 4185 |
| 2346 | CCCGCCCA G CACAAGCU | 1858 | AGCTTGTG GGCTAGCTACAACGA TGGGCGGG | 4186 |
| 2348 | CGCCCAGC A CAAGCUCA | 1859 | TGAGCTTG GGCTAGCTACAACGA GCTGGGCG | 4187 |
| 2352 | CAGCACAA G CUCAGGAC | 1860 | GTCCTGAG GGCTAGCTACAACGA TTGTGCTG | 4188 |
| 2359 | AGCUCAGG A CAUGGAGG | 1861 | CCTCCATG GGCTAGCTACAACGA CCTGAGCT | 4189 |
| 2361 | CUCAGGAC A UGGAGGUG | 1862 | CACCTCCA GGCTAGCTACAACGA GTCCTGAG | 4190 |
| 2367 | ACAUGGAG G UGCCGGAU | 1863 | ATCCGGCA GGCTAGCTACAACGA CTCCATGT | 4191 |
| 2369 | AUGGAGGU G CCGGAUGC | 1864 | GCATCCGG GGCTAGCTACAACGA ACCTCCAT | 4192 |
| 2374 | GGUGCCGG A UGCAGGAA | 1865 | TTCCTGCA GGCTAGCTACAACGA CCGGCACC | 4193 |
| 2376 | UGCCGGAU G CAGGAAGG | 1866 | CCTTCCTG GGCTAGCTACAACGA ATCCGGCA | 4194 |
| 2387 | GGAAGGAG G UGCAGACG | 1867 | CGTCTGCA GGCTAGCTACAACGA CTCCTTCC | 4195 |
| 2389 | AAGGAGGU G CAGACGGA | 1868 | TCCGTCTG GGCTAGCTACAACGA ACCTCCTT | 4196 |
| 2393 | AGGUGCAG A CGGAAGGA | 1869 | TCCTTCCG GGCTAGCTACAACGA CTGCACCT | 4197 |
| 2415 | AAGGAAGG A CGGAAGCA | 1870 | TGCTTCCG GGCTAGCTACAACGA CCTTCCTT | 4198 |
| 2421 | GGACGGAA G CAAGGAAG | 1871 | CTTCCTTG GGCTAGCTACAACGA TTCCGTCC | 4199 |
| 2439 | AAGGAAGG G CUGCUGGA | 1872 | TCCAGCAG GGCTAGCTACAACGA CCTTCCTT | 4200 |
| 2442 | GAAGGGCU G CUGGAGCC | 1873 | GGCTCCAG GGCTAGCTACAACGA AGCCCTTC | 4201 |
| 2448 | CUGCUGGA G CCCAGUCA | 1874 | TGACTGGG GGCTAGCTACAACGA TCCAGCAG | 4202 |
| 2453 | GGAGCCCA G UCACCCCG | 1875 | CGGGGTGA GGCTAGCTACAACGA TGGGCTCC | 4203 |
| 2456 | GCCCAGUC A CCCCGGGA | 1876 | TCCCGGGG GGCTAGCTACAACGA GACTGGGC | 4204 |
| 2464 | ACCCCGGG A CCGUGGGC | 1877 | GCCCACGG GGCTAGCTACAACGA CCCGGGGT | 4205 |
| 2467 | CCGGGACC G UGGGCCGA | 1878 | TCGGCCCA GGCTAGCTACAACGA GGTCCCGG | 4206 |
| 2471 | GACCGUGG G CCGAGGUG | 1879 | CACCTCGG GGCTAGCTACAACGA CCACGGTC | 4207 |
| 2477 | GGGCCGAG G UGACUGCA | 1880 | TGCAGTCA GGCTAGCTACAACGA CTCGGCCC | 4208 |
| 2480 | CCGAGGUG A CUGCAGAC | 1881 | GTCTGCAG GGCTAGCTACAACGA CACCTCGG | 4209 |
| 2483 | AGGUGACU G CAGACCCU | 1882 | AGGGTCTG GGCTAGCTACAACGA AGTCACCT | 4210 |
| 2487 | GACUGCAG A CCCUCCCA | 1883 | TGGGAGGG GGCTAGCTACAACGA CTGCAGTC | 4211 |
| 2501 | CCAGGGAG G CUGUGCAC | 1884 | GTGCACAG GGCTAGCTACAACGA CTCCCTGG | 4212 |
| 2504 | GGGAGGCU G UGCACAGA | 1885 | TCTGTGCA GGCTAGCTACAACGA AGCCTCCC | 4213 |
| 2506 | GAGGCUGU G CACAGACU | 1886 | AGTCTGTG GGCTAGCTACAACGA ACAGCCTC | 4214 |
| 2508 | GGCUGUGC A CAGACUGU | 1887 | ACAGTCTG GGCTAGCTACAACGA GCACAGCC | 4215 |
| 2512 | GUGCACAG A CUGUCUUG | 1888 | CAAGACAG GGCTAGCTACAACGA CTGTGCAC | 4216 |
| 2515 | CACAGACU G UCUUGAAC | 1889 | GTTCAAGA GGCTAGCTACAACGA AGTCTGTG | 4217 |
| 2522 | UGUCUUGA A CAUCCCAA | 1890 | TTGGGATG GGCTAGCTACAACGA TCAAGACA | 4218 |
| 2524 | UCUUGAAC A UCCCAAAU | 1891 | ATTTGGGA GGCTAGCTACAACGA GTTCAAGA | 4219 |
| 2531 | CAUCCCAA A UGCCACCG | 1892 | CGGTGGCA GGCTAGCTACAACGA TTGGGATG | 4220 |
| 2533 | UCCCAAAU G CCACCGGA | 1893 | TCCGGTGG GGCTAGCTACAACGA ATTTGGGA | 4221 |
| 2536 | CAAAUGCC A CCGGAACC | 1894 | GGTTCCGG GGCTAGCTACAACGA GGCATTTG | 4222 |
| 2542 | CCACCGGA A CCCCAGCC | 1895 | GGCTGGGG GGCTAGCTACAACGA TCCGGTGG | 4223 |
| 2548 | GAACCCCA G CCCUUAGC | 1896 | GCTAAGGG GGCTAGCTACAACGA TGGGGTTC | 4224 |
| 2555 | AGCCCUUA G CUCCCCUC | 1897 | GAGGGGAG GGCTAGCTACAACGA TAAGGGCT | 4225 |
| 2568 | CCUCCCAG G CCUCUGUG | 1898 | CACAGAGG GGCTAGCTACAACGA CTGGGAGG | 4226 |
| 2574 | AGGCCUCU G UGGGCCCU | 1899 | AGGGCCCA GGCTAGCTACAACGA AGAGGCCT | 4227 |
| 2578 | CUCUGUGG G CCCUUGUC | 1900 | GACAAGGG GGCTAGCTACAACGA CCACAGAG | 4228 |
| 2584 | GGGCCCUU G UCGGGCAC | 1901 | GTGCCCGA GGCTAGCTACAACGA AAGGGCCC | 4229 |
| 2589 | CUUGUCGG G CACAGAUG | 1902 | CATCTGTG GGCTAGCTACAACGA CCGACAAG | 4230 |
| 2591 | UGUCGGGC A CAGAUGGG | 1903 | CCCATCTG GGCTAGCTACAACGA GCCCGACA | 4231 |
| 2595 | GGGCACAG A UGGGAUCA | 1904 | TGATCCCA GGCTAGCTACAACGA CTGTGCCC | 4232 |
| 2600 | CAGAUGGG A UCACAGUA | 1905 | TACTGTGA GGCTAGCTACAACGA CCCATCTG | 4233 |
| 2603 | AUGGGAUC A CAGUAAAU | 1906 | ATTTACTG GGCTAGCTACAACGA GATCCCAT | 4234 |
| 2606 | GGAUCACA G UAAAUUAU | 1907 | ATAATTTA GGCTAGCTACAACGA TGTGATCC | 4235 |
| 2610 | CACAGUAA A UUAUUGGA | 1908 | TCCAATAA GGCTAGCTACAACGA TTACTGTG | 4236 |
| 2613 | AGUAAAUU A UUGGAUGG | 1909 | CCATCCAA GGCTAGCTACAACGA AATTTACT | 4237 |
| 2618 | AUUAUUGG A UGGUCUUG | 1910 | CAAGACCA GGCTAGCTACAACGA CCAATAAT | 4238 |
| 2621 | AUUGGAUG G UCUUGAUC | 1911 | GATCAAGA GGCTAGCTACAACGA CATCCAAT | 4239 |
| 2627 | UGGUCUUG A UCUUGGUU | 1912 | AACCAAGA GGCTAGCTACAACGA CAAGACCA | 4240 |
| 2633 | UGAUCUUG G UUUUCGGC | 1913 | GCCGAAAA GGCTAGCTACAACGA CAAGATCA | 4241 |
| 2640 | GGUUUUCG G CUGAGGGU | 1914 | ACCCTCAG GGCTAGCTACAACGA CGAAAACC | 4242 |
| 2647 | GGCUGAGG G UGGGACAC | 1915 | GTGTCCCA GGCTAGCTACAACGA CCTCAGCC | 4243 |
| 2652 | AGGGUGGG A CACGGUGC | 1916 | GCACCGTG GGCTAGCTACAACGA CCCACCCT | 4244 |
| 2654 | GGUGGGAC A CGGUGCGC | 1917 | GCGCACCG GGCTAGCTACAACGA GTCCCACC | 4245 |
| 2657 | GGGACACG G UGCGCGUG | 1918 | CACGCGCA GGCTAGCTACAACGA CGTGTCCC | 4246 |
| 2659 | GACACGGU G CGCGUGUG | 1919 | CACACGCG GGCTAGCTACAACGA ACCGTGTC | 4247 |
| 2661 | CACGGUGC G CGUGUGGC | 1920 | GCCACACG GGCTAGCTACAACGA GCACCGTG | 4248 |
| 2663 | CGGUGCGC G UGUGGCCU | 1921 | AGGCCACA GGCTAGCTACAACGA GCGCACCG | 4249 |
| 2665 | GUGCGCGU G UGGCCUGG | 1922 | CCAGGCCA GGCTAGCTACAACGA ACGCGCAC | 4250 |
| 2668 | CGCGUGUG G CCUGGCAU | 1923 | ATGCCAGG GGCTAGCTACAACGA CACACGCG | 4251 |
| 2673 | GUGGCCUG G CAUGAGGU | 1924 | ACCTCATG GGCTAGCTACAACGA CAGGCCAC | 4252 |
| 2675 | GGCCUGGC A UGAGGUAU | 1925 | ATACCTCA GGCTAGCTACAACGA GCCAGGCC | 4253 |
| 2680 | GGCAUGAG G UAUGUCGG | 1926 | CCGACATA GGCTAGCTACAACGA CTCATGCC | 4254 |
| 2682 | CAUGAGGU A UGUCGGAA | 1927 | TTCCGACA GGCTAGCTACAACGA ACCTCATG | 4255 |
| 2684 | UGAGGUAU G UCGGAACC | 1928 | GGTTCCGA GGCTAGCTACAACGA ATACCTCA | 4256 |
| 2690 | AUGUCGGA A CCUCAGGC | 1929 | GCCTGAGG GGCTAGCTACAACGA TCCGACAT | 4257 |
| 2697 | AACCUCAG G CCUGUCCA | 1930 | TGGACAGG GGCTAGCTACAACGA CTGAGGTT | 4258 |
| 2701 | UCAGGCCU G UCCAGCCC | 1931 | GGGCTGGA GGCTAGCTACAACGA AGGCCTGA | 4259 |
| 2706 | CCUGUCCA G CCCUGGGC | 1932 | GCCCAGGG GGCTAGCTACAACGA TGGACAGG | 4260 |
| 2713 | AGCCCUGG G CUCUCCAU | 1933 | ATGGAGAG GGCTAGCTACAACGA CCAGGGCT | 4261 |
| 2720 | GGCUCUCC A UAGCCUUU | 1934 | AAAGGCTA GGCTAGCTACAACGA GGAGAGCC | 4262 |
| 2723 | UCUCCAUA G CCUUUGGG | 1935 | CCCAAAGG GGCTAGCTACAACGA TATGGAGA | 4263 |
| 2740 | AGGGGGAG G UUGGGAGA | 1936 | TCTCCCAA GGCTAGCTACAACGA CTCCCCCT | 4264 |
| 2750 | UGGGAGAG G CCGGUCAG | 1937 | CTGACCGG GGCTAGCTACAACGA CTCTCCCA | 4265 |
| 2754 | AGAGGCCG G UCAGGGGU | 1938 | ACCCCTGA GGCTAGCTACAACGA CGGCCTCT | 4266 |
| 2761 | GGUCAGGG G UCUGGGCU | 1939 | AGCCCAGA GGCTAGCTACAACGA CCCTGACC | 4267 |
| 2767 | GGGUCUGG G CUGUGGUG | 1940 | CACCACAG GGCTAGCTACAACGA CCAGACCC | 4268 |
| 2770 | UCUGGGCU G UGGUGCUC | 1941 | GAGCACCA GGCTAGCTACAACGA AGCCCAGA | 4269 |
| 2773 | GGGCUGUG G UGCUCUCU | 1942 | AGAGAGCA GGCTAGCTACAACGA CACAGCCC | 4270 |
| 2775 | GCUGUGGU G CUCUCUCC | 1943 | GGAGAGAG GGCTAGCTACAACGA ACCACAGC | 4271 |
| 2788 | CUCCUCCC G CCUGCCCC | 1944 | GGGGCAGG GGCTAGCTACAACGA GGGAGGAG | 4272 |
| 2792 | UCCCGCCU G CCCCAGUG | 1945 | CACTGGGG GGCTAGCTACAACGA AGGCGGGA | 4273 |
| 2798 | CUGCCCCA G UGUCCACG | 1946 | CGTGGACA GGCTAGCTACAACGA TGGGGCAG | 4274 |
| 2800 | GCCCCAGU G UCCACGGC | 1947 | GCCGTGGA GGCTAGCTACAACGA ACTGGGGC | 4275 |
| 2804 | CAGUGUCC A CGGCUUCU | 1948 | AGAAGCCG GGCTAGCTACAACGA GGACACTG | 4276 |
| 2807 | UGUCCACG G CUUCUGGC | 1949 | GCCAGAAG GGCTAGCTACAACGA CGTGGACA | 4277 |
| 2814 | GGCUUCUG G CAGAGAGC | 1950 | GCTCTCTG GGCTAGCTACAACGA CAGAAGCC | 4278 |
| 2821 | GGCAGAGA G CUCUGGAC | 1951 | GTCCAGAG GGCTAGCTACAACGA TCTCTGCC | 4279 |
| 2828 | AGCUCUGG A CAAGCAGG | 1952 | CCTGCTTG GGCTAGCTACAACGA CCAGAGCT | 4280 |
| 2832 | CUGGACAA G CAGGCAGA | 1953 | TCTGCCTG GGCTAGCTACAACGA TTGTCCAG | 4281 |
| 2836 | ACAAGCAG G CAGAUCAU | 1954 | ATGATCTG GGCTAGCTACAACGA CTGCTTGT | 4282 |
| 2840 | GCAGGCAG A UCAUAAGG | 1955 | CCTTATGA GGCTAGCTACAACGA CTGCCTGC | 4283 |
| 2843 | GGCAGAUC A UAAGGACA | 1956 | TGTCCTTA GGCTAGCTACAACGA GATCTGCC | 4284 |
| 2849 | UCAUAAGG A CAGAGAGC | 1957 | GCTCTCTG GGCTAGCTACAACGA CCTTATGA | 4285 |
| 2856 | GACAGAGA G CUUACUGU | 1958 | ACAGTAAG GGCTAGCTACAACGA TCTCTGTC | 4286 |
| 2860 | GAGAGCUU A CUGUGCUU | 1959 | AAGCACAG GGCTAGCTACAACGA AAGCTCTC | 4287 |
| 2863 | AGCUUACU G UGCUUCUA | 1960 | TAGAAGCA GGCTAGCTACAACGA AGTAAGCT | 4288 |
| 2865 | CUUACUGU G CUUCUACC | 1961 | GGTAGAAG GGCTAGCTACAACGA ACAGTAAG | 4289 |
| 2871 | GUGCUUCU A CCAACUAG | 1962 | CTAGTTGG GGCTAGCTACAACGA AGAAGCAC | 4290 |
| 2875 | UUCUACCA A CUAGGAGG | 1963 | CCTCCTAG GGCTAGCTACAACGA TGGTAGAA | 4291 |
| 2884 | CUAGGAGG G CGUCCUGG | 1964 | CCAGGACG GGCTAGCTACAACGA CCTCCTAG | 4292 |
| 2886 | AGGAGGGC G UCCUGGUC | 1965 | GACCAGGA GGCTAGCTACAACGA GCCCTCCT | 4293 |
| 2892 | GCGUCCUG G UCCUCCAG | 1966 | CTGGAGGA GGCTAGCTACAACGA CAGGACGC | 4294 |
| 2907 | AGAGGGAG G UGGUUUCA | 1967 | TGAAACCA GGCTAGCTACAACGA CTCCCTCT | 4295 |
| 2910 | GGGAGGUG G UUUCAGGG | 1968 | CCCTGAAA GGCTAGCTACAACGA CACCTCCC | 4296 |
| 2919 | UUUCAGGG G UUGGGGAU | 1969 | ATCCCCAA GGCTAGCTACAACGA CCCTGAAA | 4297 |
| 2926 | GGUUGGGG A UCUGUGCC | 1970 | GGCACAGA GGCTAGCTACAACGA CCCCAACC | 4298 |
| 2930 | GGGGAUCU G UGCCGGUG | 1971 | CACCGGCA GGCTAGCTACAACGA AGATCCCC | 4299 |
| 2932 | GGAUCUGU G CCGGUGGC | 1972 | GCCACCGG GGCTAGCTACAACGA ACAGATCC | 4300 |
| 2936 | CUGUGCCG G UGGCUCUG | 1973 | CAGAGCCA GGCTAGCTACAACGA CGGCACAG | 4301 |
| 2939 | UGCCGGUG G CUCUGGUC | 1974 | GACCAGAG GGCTAGCTACAACGA CACCGGCA | 4302 |
| 2945 | UGGCUCUG G UCUCUGCU | 1975 | AGCAGAGA GGCTAGCTACAACGA CAGAGCCA | 4303 |
| 2951 | UGGUCUCU G CUGGGAGC | 1976 | GCTCCCAG GGCTAGCTACAACGA AGAGACCA | 4304 |
| 2958 | UGCUGGGA G CCUUCUUG | 1977 | CAAGAAGG GGCTAGCTACAACGA TCCCAGCA | 4305 |
| 2967 | CCUUCUUG G CGGUGAGA | 1978 | TCTCACCG GGCTAGCTACAACGA CAAGAAGG | 4306 |
| 2970 | UCUUGGCG G UGAGAGGC | 1979 | GCCTCTCA GGCTAGCTACAACGA CGCCAAGA | 4307 |
| 2977 | GGUGAGAG G CAUCACCU | 1980 | AGGTGATG GGCTAGCTACAACGA CTCTCACC | 4308 |
| 2979 | UGAGAGGC A UCACCUUU | 1981 | AAAGGTGA GGCTAGCTACAACGA GCCTCTCA | 4309 |
| 2982 | GAGGCAUC A CCUUUCCU | 1982 | AGGAAAGG GGCTAGCTACAACGA GATGCCTC | 4310 |
| 2992 | CUUUCCUG A CUUGCUCC | 1983 | GGAGCAAG GGCTAGCTACAACGA CAGGAAAG | 4311 |
| 2996 | CCUCACUU G CUCCCAGC | 1984 | GCTGGGAG GGCTAGCTACAACGA AAGTCAGG | 4312 |
| 3003 | UGCUCCCA G CGUGAAAU | 1985 | ATTTCACG GGCTAGCTACAACGA TGGGAGCA | 4313 |
| 3005 | CUCCCAGC G UGAAAUGC | 1986 | GCATTTCA GGCTAGCTACAACGA GCTGGGAG | 4314 |
| 3010 | AGCGUGAA A UGCACCUG | 1987 | CAGGTGCA GGCTAGCTACAACGA TTCACGCT | 4315 |
| 3012 | CGUGAAAU G CACCUGCC | 1988 | GGCAGGTG GGCTAGCTACAACGA ATTTCACG | 4316 |
| 3014 | UGAAAUGC A CCUGCCAA | 1989 | TTGGCAGG GGCTAGCTACAACGA GCATTTCA | 4317 |
| 3018 | AUGCACCU G CCAAGAAU | 1990 | ATTCTTGG GGCTAGCTACAACGA AGGTGCAT | 4318 |
| 3025 | UGCCAAGA A UGGCAGAC | 1991 | GTCTGCCA GGCTAGCTACAACGA TCTTGGCA | 4319 |
| 3028 | CAAGAAUG G CAGACAUA | 1992 | TATGTCTG GGCTAGCTACAACGA CATTCTTG | 4320 |
| 3032 | AAUGGCAG A CAUAGGGA | 1993 | TCCCTATG GGCTAGCTACAACGA CTGCCATT | 4321 |
| 3034 | UGGCAGAC A UAGGGACC | 1994 | GGTCCCTA GGCTAGCTACAACGA GTCTGCCA | 4322 |
| 3040 | ACAUAGGG A CCCCGCCU | 1995 | AGGCGGGG GGCTAGCTACAACGA CCCTATGT | 4323 |
| 3045 | GGGACCCC G CCUCCUGG | 1996 | CCAGGAGG GGCTAGCTACAACGA GGGGTCCC | 4324 |
| 3054 | CCUCCUGG G CCUUCACA | 1997 | TGTGAAGG GGCTAGCTACAACGA CCAGGAGG | 4325 |
| 3060 | GGGCCUUC A CAUGCCCA | 1998 | TGGGCATG GGCTAGCTACAACGA GAAGGCCC | 4326 |
| 3062 | GCCUUCAC A UGCCCAGU | 1999 | ACTGGGCA GGCTAGCTACAACGA GTGAAGGC | 4327 |
| 3064 | CUUCACAU G CCCAGUUU | 2000 | AAACTGGG GGCTAGCTACAACGA ATGTGAAG | 4328 |
| 3069 | CAUGCCCA G UUUUCUUC | 2001 | GAAGAAAA GGCTAGCTACAACGA TGGGCATG | 4329 |
| 3079 | UUUCUUCG G CUCUGUGG | 2002 | CCACAGAG GGCTAGCTACAACGA CGAAGAAA | 4330 |
| 3084 | UCGGCUCU G UGGCCUGA | 2003 | TCAGGCCA GGCTAGCTACAACGA AGAGCCGA | 4331 |
| 3087 | GCUCUGUG G CCUGAAGC | 2004 | GCTTCAGG GGCTAGCTACAACGA CACAGAGC | 4332 |
| 3094 | GGCCUGAA G CGGUCUGU | 2005 | ACAGACCG GGCTAGCTACAACGA TTCAGGCC | 4333 |
| 3097 | CUGAAGCG G UCUGUGGA | 2006 | TCCACAGA GGCTAGCTACAACGA CGCTTCAG | 4334 |
| 3101 | AGCGGUCU G UGGACCUU | 2007 | AAGGTCCA GGCTAGCTACAACGA AGACCGCT | 4335 |
| 3105 | GUCUGUGG A CCUUGGAA | 2008 | TTCCAAGG GGCTAGCTACAACGA CCACAGAC | 4336 |
| 3114 | CCUUGGAA G UAGGGCUC | 2009 | GAGCCCTA GGCTAGCTACAACGA TTCCAAGG | 4337 |
| 3119 | GAAGUAGG G CUCCAGCA | 2010 | TGCTGGAG GGCTAGCTACAACGA CCTACTTC | 4338 |
| 3125 | GGGCUCCA G CACCGACU | 2011 | AGTCGGTG GGCTAGCTACAACGA TGGAGCCC | 4339 |
| 3127 | GCUCCAGC A CCGACUGG | 2012 | CCAGTCGG GGCTAGCTACAACGA GCTGGAGC | 4340 |
| 3131 | CAGCACCG A CUGGCCUC | 2013 | GAGGCCAG GGCTAGCTACAACGA CGGTGCTG | 4341 |
| 3135 | ACCGACUG G CCUCAGGC | 2014 | GCCTGAGG GGCTAGCTACAACGA CAGTCGGT | 4342 |
| 3142 | GGCCUCAG G CCUCUGCC | 2015 | GGCAGAGG GGCTAGCTACAACGA CTGAGGCC | 4343 |
| 3148 | AGGCCUCU G CCUCAUUG | 2016 | CAATGAGG GGCTAGCTACAACGA AGAGGCCT | 4344 |
| 3153 | UCUGCCUC A UUGGUGGU | 2017 | ACCACCAA GGCTAGCTACAACGA GAGGCAGA | 4345 |
| 3157 | CCUCAUUG G UGGUCGGG | 2018 | CCCGACCA GGCTAGCTACAACGA CAATGAGG | 4346 |
| 3160 | CAUUGGUG G UCGGGUAG | 2019 | CTACCCGA GGCTAGCTACAACGA CACCAATG | 4347 |
| 3165 | GUGGUCGG G UAGCGGCC | 2020 | GGCCGCTA GGCTAGCTACAACGA CCGACCAC | 4348 |
| 3168 | GUCGGGUA G CGGCCAGU | 2021 | ACTGGCCG GGCTAGCTACAACGA TACCCGAC | 4349 |
| 3171 | GGGUAGCG G CCAGUAGG | 2022 | CCTACTGG GGCTAGCTACAACGA CGCTACCC | 4350 |
| 3175 | AGCGGCCA G UAGGGCGU | 2023 | ACGCCCTA GGCTAGCTACAACGA TGGCCGCT | 4351 |
| 3180 | CCAGUAGG G CGUGGGAG | 2024 | CTCCCACG GGCTAGCTACAACGA CCTACTGG | 4352 |
| 3182 | AGUAGGGC G UGGGAGCC | 2025 | GGCTCCCA GGCTAGCTACAACGA GCCCTACT | 4353 |
| 3188 | GCGUGGGA G CCUGGCCA | 2026 | TGGCCAGG GGCTAGCTACAACGA TCCCACGC | 4354 |
| 3193 | GGAGCCUG G CCAUCCCU | 2027 | AGGGATGG GGCTAGCTACAACGA CAGGCTCC | 4355 |
| 3196 | GCCUGGCC A UCCCUGCC | 2028 | GGCAGGGA GGCTAGCTACAACGA GGCCAGGC | 4356 |
| 3202 | CCAUCCCU G CCUCCUGG | 2029 | CCAGGAGG GGCTAGCTACAACGA AGGGATGG | 4357 |
| 3212 | CUCCUGGA G UGGACGAG | 2030 | CTCGTCCA GGCTAGCTACAACGA TCCAGGAG | 4358 |
| 3216 | UGGAGUGG A CGAGGUUG | 2031 | CAACCTCG GGCTAGCTACAACGA CCACTCCA | 4359 |
| 3221 | UGGACGAG G UUGGCAGC | 2032 | GCTGCCAA GGCTAGCTACAACGA CTCGTCCA | 4360 |
| 3225 | CGAGGUUG G CAGCUGGU | 2033 | ACCAGCTG GGCTAGCTACAACGA CAACCTCG | 4361 |
| 3228 | GGUUGGCA G CUGGUCCG | 2034 | CGGACCAG GGCTAGCTACAACGA TGCCAACC | 4362 |
| 3232 | GGCAGCUG G UCCGUCUG | 2035 | CAGACGGA GGCTAGCTACAACGA CAGCTGCC | 4363 |
| 3236 | GCUGGUCC G UCUGCUCC | 2036 | GGAGCAGA GGCTAGCTACAACGA GGACCAGC | 4364 |
| 3240 | GUCCGUCU G CUCCUGCC | 2037 | GGCAGGAG GGCTAGCTACAACGA AGACGGAC | 4365 |
| 3246 | CUGCUCCU G CCCCACUC | 2038 | GAGTGGGG GGCTAGCTACAACGA AGGAGCAG | 4366 |
| 3251 | CCUGCCCC A CUCUCCCC | 2039 | GGGGAGAG GGCTAGCTACAACGA GGGGCAGG | 4367 |
| 3261 | UCUCCCCC G CCCCUGCC | 2040 | GGCAGGGG GGCTAGCTACAACGA GGGGGAGA | 4368 |
| 3267 | CCGCCCCU G CCCUCACC | 2041 | GGTGAGGG GGCTAGCTACAACGA AGGGGCGG | 4369 |
| 3273 | CUGCCCUC A CCCUACCC | 2042 | GGGTAGGG GGCTAGCTACAACGA GAGGGCAG | 4370 |
| 3278 | CUCACCCU A CCCUUGCC | 2043 | GGCAAGGG GGCTAGCTACAACGA AGGGTGAG | 4371 |
| 3284 | CUACCCUU G CCCCACGC | 2044 | GCGTGGGG GGCTAGCTACAACGA AAGGGTAG | 4372 |
| 3289 | CUUGCCCC A CGCCUGCC | 2045 | GGCAGGCG GGCTAGCTACAACGA GGGGCAAG | 4373 |
| 3291 | UGCCCCAC G CCUGCCUC | 2046 | GAGGCAGG GGCTAGCTACAACGA GTGGGGCA | 4374 |
| 3295 | CCACGCCU G CCUCAUGG | 2047 | CCATGAGG GGCTAGCTACAACGA AGGCGTGG | 4375 |
| 3300 | CCUGCCUC A UGGCUGGU | 2048 | ACCAGCCA GGCTAGCTACAACGA GAGGCAGG | 4376 |
| 3303 | GCCUCAUG G CUGGUUGC | 2049 | GCAACCAG GGCTAGCTACAACGA CATGAGGC | 4377 |
| 3307 | CAUGGCUG G UUGCUCUU | 2050 | AAGAGCAA GGCTAGCTACAACGA CAGCCATG | 4378 |
| 3310 | GGCUGGUU G CUCUUGGA | 2051 | TCCAAGAG GGCTAGCTACAACGA AACCAGCC | 4379 |
| 3319 | CUCUUGGA G CCUGGUAG | 2052 | CTACCAGG GGCTAGCTACAACGA TCCAAGAG | 4380 |
| 3324 | GGAGCCUG G UAGUGUCA | 2053 | TGACACTA GGCTAGCTACAACGA CAGGCTCC | 4381 |
| 3327 | GCCUGGUA G UGUCACUG | 2054 | CAGTGACA GGCTAGCTACAACGA TACCAGGC | 4382 |
| 3329 | CUGGUAGU G UCACUGGC | 2055 | GCCAGTGA GGCTAGCTACAACGA ACTACCAG | 4383 |
| 3332 | GUAGUGUC A CUGGCUCA | 2056 | TGAGCCAG GGCTAGCTACAACGA GACACTAC | 4384 |
| 3336 | UGUCACUG G CUCAGCCU | 2057 | AGGCTGAG GGCTAGCTACAACGA CAGTGACA | 4385 |
| 3341 | CUGGCUCA G CCUUGCUG | 2058 | CAGCAAGG GGCTAGCTACAACGA TGAGCCAG | 4386 |
| 3346 | UCAGCCUU G CUGGGUAU | 2059 | ATACCCAG GGCTAGCTACAACGA AAGGCTGA | 4387 |
| 3351 | CUUGCUGG G UAUACACA | 2060 | TGTGTATA GGCTAGCTACAACGA CCAGCAAG | 4388 |
| 3353 | UGCUGGGU A UACACAGG | 2061 | CCTGTGTA GGCTAGCTACAACGA ACCCAGCA | 4389 |
| 3355 | CUGGGUAU A CACAGGCU | 2062 | AGCCTGTG GGCTAGCTACAACGA ATACCCAG | 4390 |
| 3357 | GGGUAUAC A CAGGCUCU | 2063 | AGAGCCTG GGCTAGCTACAACGA GTATACCC | 4391 |
| 3361 | AUACACAG G CUCUGCCA | 2064 | TGGCAGAG GGCTAGCTACAACGA CTGTGTAT | 4392 |
| 3366 | CAGGCUCU G CCACCCAC | 2065 | GTGGGTGG GGCTAGCTACAACGA AGAGCCTG | 4393 |
| 3369 | GCUCUGCC A CCCACUCU | 2066 | AGAGTGGG GGCTAGCTACAACGA GGCAGAGC | 4394 |
| 3373 | UGCCACCC A CUCUGCUC | 2067 | GACCAGAG GGCTAGCTACAACGA GGGTGGCA | 4395 |
| 3378 | CCCACUCU G CUCCAAGG | 2068 | CCTTGGAG GGCTAGCTACAACGA AGAGTGGG | 4396 |
| 3388 | UCCAAGGG G CUUGCCCU | 2069 | AGGGCAAG GGCTAGCTACAACGA CCCTTGGA | 4397 |
| 3392 | AGGGGCUU G CCCUGCCU | 2070 | AGGCAGGG GGCTAGCTACAACGA AAGCCCCT | 4398 |
| 3397 | CUUGCCCU G CCUUGGGC | 2071 | GCCCAAGG GGCTAGCTACAACGA AGGGCAAG | 4399 |
| 3404 | UGCCUUGG G CCAAGUUC | 2072 | GAACTTGG GGCTAGCTACAACGA CCAAGGCA | 4400 |
| 3409 | UGGGCCAA G UUCUAGGU | 2073 | ACCTAGAA GGCTAGCTACAACGA TTGGCCCA | 4401 |
| 3416 | AGUUCUAG G UCUGGCCA | 2074 | TGGCCAGA GGCTAGCTACAACGA CTAGAACT | 4402 |
| 3421 | UAGGUCUG G CCACAGCC | 2075 | GGCTGTGG GGCTAGCTACAACGA CAGACCTA | 4403 |
| 3424 | GUCUGGCC A CAGCCACA | 2076 | TGTGGCTG GGCTAGCTACAACGA GGCCAGAC | 4404 |
| 3427 | UGGCCACA G CCACAGAC | 2077 | GTCTGTGG GGCTAGCTACAACGA TGTGGCCA | 4405 |
| 3430 | CCACAGCC A CAGACAGC | 2078 | GCTGTCTG GGCTAGCTACAACGA GGCTGTGG | 4406 |
| 3434 | AGCCACAG A CAGCUCAG | 2079 | CTGAGCTG GGCTAGCTACAACGA CTGTGGCT | 4407 |
| 3437 | CACAGACA G CUCAGUCC | 2080 | GGACTGAG GGCTAGCTACAACGA TGTCTGTG | 4408 |
| 3442 | ACAGCUCA G UCCCCUGU | 2081 | ACAGGGGA GGCTAGCTACAACGA TGAGCTGT | 4409 |
| 3449 | AGUCCCCU G UGUGGUCA | 2082 | TGACCACA GGCTAGCTACAACGA AGGGGACT | 4410 |
| 3451 | UCCCCUGU G UGGUCAUC | 2083 | GATGACCA GGCTAGCTACAACGA ACAGGGGA | 4411 |
| 3454 | CCUGUGUG G UCAUCCUG | 2084 | CAGGATGA GGCTAGCTACAACGA CACACAGG | 4412 |
| 3457 | GUGUGGUC A UCCUGGCU | 2085 | AGCCAGGA GGCTAGCTACAACGA GACCACAC | 4413 |
| 3463 | UCAUCCUG G CUUCUGCU | 2086 | AGCAGAAG GGCTAGCTACAACGA CAGGATGA | 4414 |
| 3469 | UGGCUUCU G CUGGGGGC | 2087 | GCCCCCAG GGCTAGCTACAACGA AGAAGCCA | 4415 |
| 3476 | UGCUGGGG G CCCACAGC | 2088 | GCTGTGGG GGCTAGCTACAACGA CCCCAGCA | 4416 |
| 3480 | GGGGGCCC A CAGCGCCC | 2089 | GGGCGCTG GGCTAGCTACAACGA GGGCCCCC | 4417 |
| 3483 | GGCCCACA G CGCCCCUG | 2090 | CAGGGGCG GGCTAGCTACAACGA TGTGGGCC | 4418 |
| 3485 | CCCACAGC G CCCCUGGU | 2091 | ACCAGGGG GGCTAGCTACAACGA GCTGTGGG | 4419 |
| 3492 | CGCCCCUG G UGCCCCUC | 2092 | GAGGGGCA GGCTAGCTACAACGA CAGGGGCG | 4420 |
| 3494 | CCCCUGGU G CCCCUCCC | 2093 | GGGAGGGG GGCTAGCTACAACGA ACCAGGGG | 4421 |
| 3511 | CUCCCAGG G CCCGGGUU | 2094 | AACCCGGG GGCTAGCTACAACGA CCTGGGAG | 4422 |
| 3517 | GGGCCCGG G UUGAGGCU | 2095 | AGCCTCAA GGCTAGCTACAACGA CCGGGCCC | 4423 |
| 3523 | GGGUUGAG G CUGGGCCA | 2096 | TGGCCCAG GGCTAGCTACAACGA CTCAACCC | 4424 |
| 3528 | GAGGCUGG G CCAGGCCC | 2097 | GGGCCTGG GGCTAGCTACAACGA CCAGCCTC | 4425 |
| 3533 | UGGGCCAG G CCCUCUGG | 2098 | CCAGAGGG GGCTAGCTACAACGA CTGGCCCA | 4426 |
| 3543 | CCUCUGGG A CGGGGACU | 2099 | AGTCCCCG GGCTAGCTACAACGA CCCAGAGG | 4427 |
| 3549 | GGACGGGG A CUUGUGCC | 2100 | GGCACAAG GGCTAGCTACAACGA CCCCGTCC | 4428 |
| 3553 | GGGGACUU G UGCCCUGU | 2101 | ACAGGGCA GGCTAGCTACAACGA AAGTCCCC | 4429 |
| 3555 | GGACUUGU G CCCUGUCA | 2102 | TGACAGGG GGCTAGCTACAACGA ACAAGTCC | 4430 |
| 3560 | UGUGCCCU G UCAGGGUU | 2103 | AACCCTGA GGCTAGCTACAACGA AGGGCACA | 4431 |
| 3566 | CUGUCAGG G UUCCCUAU | 2104 | ATAGGGAA GGCTAGCTACAACGA CCTGACAG | 4432 |
| 3573 | GGUUCCCU A UCCCUGAG | 2105 | CTCAGGGA GGCTAGCTACAACGA AGGGAACC | 4433 |
| 3582 | UCCCUGAG G UUGGGGGA | 2106 | TCCCCCAA GGCTAGCTACAACGA CTCAGGGA | 4434 |
| 3593 | GGGGGAGA G CUAGCAGG | 2107 | CCTGCTAG GGCTAGCTACAACGA TCTCCCCC | 4435 |
| 3597 | GAGAGCUA G CAGGGCAU | 2108 | ATGCCCTG GGCTAGCTACAACGA TAGCTCTC | 4436 |
| 3602 | CUAGCAGG G CAUGCCGC | 2109 | GCGGCATG GGCTAGCTACAACGA CCTGCTAG | 4437 |
| 3604 | AGCAGGGC A UGCCGCUG | 2110 | CAGCGGCA GGCTAGCTACAACGA GCCCTGCT | 4438 |
| 3606 | CAGGGCAU G CCGCUGGC | 2111 | GCCAGCGG GGCTAGCTACAACGA ATGCCCTG | 4439 |
| 3609 | GGCAUGCC G CUGGCUGG | 2112 | CCAGCCAG GGCTAGCTACAACGA GGCATGCC | 4440 |
| 3613 | UGCCGCUG G CUGGCCAG | 2113 | CTGGCCAG GGCTAGCTACAACGA CAGCGGCA | 4441 |
| 3617 | GCUGGCUG G CCAGGGCU | 2114 | AGCCCTGG GGCTAGCTACAACGA CAGCCAGC | 4442 |
| 3623 | UGGCCAGG G CUGCAGGG | 2115 | CCCTGCAG GGCTAGCTACAACGA CCTGGCCA | 4443 |
| 3626 | CCAGGGCU G CAGGGACA | 2116 | TCTCCCTG GGCTAGCTACAACGA AGCCCTGG | 4444 |
| 3632 | CUGCAGGG A CACUCCCC | 2117 | GGGGAGTG GGCTAGCTACAACCA CCCTGCAG | 4445 |
| 3634 | GCAGGGAC A CUCCCCCU | 2118 | AGGGGGAG GGCTAGCTACAACGA GTCCCTGC | 4446 |
| 3646 | CCCCUUUU G UCCAGGGA | 2119 | TCCCTGGA GGCTAGCTACAACGA AAAAGGGG | 4447 |
| 3655 | UCCAGGGA A UACCACAC | 2120 | GTGTGGTA GGCTAGCTACAACGA TCCCTGGA | 4448 |
| 3657 | CAGGGAAU A CCACACUC | 2121 | GAGTGTGG GGCTAGCTACAACGA ATTCCCTG | 4449 |
| 3660 | GGAAUACC A CACUCGCC | 2122 | GGCGAGTG GGCTAGCTACAACGA GGTATTCC | 4450 |
| 3662 | AAUACCAC A CUCGCCCU | 2123 | AGGGCGAG GGCTAGCTACAACGA GTGGTATT | 4451 |
| 3666 | CCACACUC G CCCUUCUC | 2124 | GAGAAGGG GGCTAGCTACAACGA GAGTGTGG | 4452 |
| 3679 | UCUGUCGA G CGAACACC | 2125 | GGTGTTCG GGCTAGCTACAACGA TGGAGAGA | 4453 |
| 3683 | UCCAGCGA A CACCACAC | 2126 | GTGTGGTG GGCTAGCTACAACGA TCGCTGGA | 4454 |
| 3685 | CAGCGAAC A CCACACUC | 2127 | GAGTGTGG GGCTAGCTACAACGA GTTCGCTG | 4455 |
| 3688 | CGAACACC A CACUCGCC | 2128 | GGCGAGTG GGCTAGCTACAACGA GGTGTTCG | 4456 |
| 3690 | AACACCAC A CUCGCCCU | 2129 | AGGGCGAG GGCTAGCTACAACGA GTGGTGTT | 4457 |
| 3694 | CCACACUC G CCCUUCUC | 2124 | GAGAAGGG GGCTAGCTACAACGA GAGTGTGG | 4452 |
| 3711 | UCCAGGGG A CGCCACAC | 2130 | GTGTGGCG GGCTAGCTACAACGA CCCCTGGA | 4458 |
| 3713 | CAGGGGAC G CCACACUC | 2131 | GAGTGTGG GGCTAGCTACAACGA GTCCCCTG | 4459 |
| 3716 | GGGACGCC A CACUCCCC | 2132 | GGGGAGTG GGCTAGCTACAACGA GGCGTCCC | 4460 |
| 3718 | GACGCCAC A CUCCCCCU | 2133 | AGGGGGAG GGCTAGCTACAACGA GTGGCGTC | 4461 |
| 3730 | CCCCUUCU G UCCAGGGG | 2134 | CCCCTGGA GGCTAGCTACAACGA AGAAGGGG | 4462 |
| 3739 | UCCAGGGG A CGCCACAC | 2130 | GTGTGGCG GGCTAGCTACAACGA CCCCTGGA | 4458 |
| 3741 | CAGGGGAC G CCACACUC | 2131 | GAGTGTGG GGCTAGCTACAACGA GTCCCCTG | 4459 |
| 3744 | GGGACGCC A CACUCCCC | 2132 | GGGGAGTG GGCTAGCTACAACGA GGCGTCCC | 4460 |
| 3746 | GACGCCAC A CUCCCCCU | 2133 | AGGGGGAG GGCTAGCTACAACGA GTGGCGTC | 4461 |
| 3767 | UCCAGGGG A CGCCACAC | 2130 | GTGTGGCG GGCTAGCTACAACGA CCCCTGGA | 4458 |
| 3769 | CAGGGGAC G CCACACUC | 2131 | GAGTGTGG GGCTAGCTACAACGA GTCCCCTG | 4459 |
| 3772 | GGGACGCC A CACUCGCC | 2135 | GGCGAGTG GGCTAGCTACAACGA GGCGTCCC | 4463 |
| 3774 | GACGCCAC A CUCGCCCU | 2136 | AGGGCGAG GGCTAGCTACAACGA GTGGCGTC | 4464 |
| 3778 | CCACACUC G CCCUUCUC | 2124 | GAGAAGGG GGCTAGCTACAACGA GAGTGTGG | 4452 |
| 3795 | UCCAGGGG A CGCCACAC | 2130 | GTGTGGCG GGCTAGCTACAACGA CCCCTGGA | 4458 |
| 3797 | CAGGGGAC G CCACACUC | 2131 | GAGTGTGG GGCTAGCTACAACGA GTCCCCTG | 4459 |
| 3800 | GGGACGCC A CACUCCCC | 2135 | GGCGAGTG GGCTAGCTACAACGA GGCGTCCC | 4463 |
| 3802 | GACGCCAC A CUCGCCCU | 2136 | AGGGCGAG GGCTAGCTACAACGA GTGGCGTC | 4464 |
| 3806 | CCACACUC G CCCUUCUC | 2124 | GAGAAGGG GGCTAGCTACAACGA GAGTGTGG | 4452 |
| 3823 | UCCAGGGG A CGCCACAC | 2130 | CTGTGGCG GGCTAGCTACAACCA CCCCTGGA | 4458 |
| 3825 | CAGGGGAC G CCACACUC | 2131 | GAGTGTGG GGCTAGCTACAACGA GTCCCCTG | 4459 |
| 3828 | GGGACGCC A CACUCGCC | 2135 | GGCGAGTG GGCTAGCTACAACGA GGCGTCCC | 4463 |
| 3830 | GACGCCAC A CUCGCCCU | 2136 | AGGGCGAG GGCTAGCTACAACGA GTGGCGTC | 4464 |
| 3834 | CCACACUC G CCCUUCUG | 2137 | CAGAAGGG GGCTAGCTACAACGA GAGTGTGG | 4465 |
| 3842 | GCCCUUCU G UCCAGGGG | 2138 | CCCCTGGA GGCTAGCTACAACGA AGAAGGGC | 4466 |
| 3851 | UCCAGGGG A CGCCACAC | 2130 | GTGTGGCG GGCTAGCTACAACGA CCCCTGGA | 4458 |
| 3853 | CAGGGGAC G CCACACUC | 2131 | GAGTGTGG GGCTAGCTACAACGA GTCCCCTG | 4459 |
| 3856 | GGGACGCC A CACUCGCC | 2135 | GGCGAGTG GGCTAGCTACAACCA GGCGTCCC | 4463 |
| 3858 | GACGCCAC A CUCGCCCU | 2136 | AGGGCGAG GGCTAGCTACAACGA GTGGCGTC | 4464 |
| 3862 | CCACACUC G CCCUUCUC | 2124 | GAGAAGGG GGCTAGCTACAACGA GAGTGTGG | 4452 |
| 3879 | UCCAGGGG A CGCCACAC | 2130 | GTGTGGCG GGCTAGCTACAACGA CCCCTGGA | 4458 |
| 3881 | CAGGGGAC G CCACACUC | 2131 | GAGTGTGG GGCTAGCTACAACGA GTCCCCTG | 4459 |
| 3884 | GGGACGCC A CACUCGCC | 2135 | GGCGAGTG GGCTAGCTACAACGA GGCGTCCC | 4463 |
| 3886 | GACGCCAC A CUCGCCCU | 2136 | AGGGCGAG GGCTAGCTACAACGA GTGGCGTC | 4464 |
| 3890 | CCACACUC G CCCUUCUC | 2124 | GAGAAGGG GGCTAGCTACAACGA GAGTGTGG | 4452 |
| 3907 | UCCAGGGG A CGCCACAC | 2130 | GTGTGGCG GGCTAGCTACAACCA CCCCTGGA | 4458 |
| 3909 | CAGGGGAC G CCACACUC | 2131 | GAGTGTGG GGCTAGCTACAACGA GTCCCCTG | 4459 |
| 3912 | GGGACGCC A CACUCCCC | 2132 | GGGGAGTG GGCTAGCTACAACGA GGCGTCCC | 4460 |
| 3914 | GACGCCAC A CUCCCCCU | 2133 | AGGGGGAG GGCTAGCTACAACGA GTGGCGTC | 4461 |
| 3926 | CCCCUUCU G UCCAGGGG | 2134 | CCCCTGGA GGCTAGCTACAACGA AGAAGGGG | 4462 |
| 3935 | UCCAGGGG A CGCCACAC | 2130 | GTGTGGCG GGCTAGCTACAACGA CCCCTGGA | 4458 |
| 3937 | CAGGGGAC G CCACACUC | 2131 | GAGTGTGG GGCTAGCTACAACGA GTCCCCTG | 4459 |
| 3940 | GGGACGCC A CACUCCCC | 2132 | GGGGAGTG GGCTAGCTACAACGA GGCGTCCC | 4460 |
| 3942 | GACGCCAC A CUCCCCCU | 2133 | AGGGGGAG GGCTAGCTACAACGA GTGGCGTC | 4461 |
| 3963 | UCCAGGGG A CGCCACAC | 2130 | GTGTGGCG GGCTAGCTACAACGA CCCCTGGA | 4458 |
| 3965 | CAGGGGAC G CCACACUC | 2131 | GAGTGTCG GGCTAGCTACAACGA GTCCCCTG | 4459 |
| 3968 | GGGACGCC A CACUCCCC | 2132 | GGGGAGTG GGCTAGCTACAACGA GGCGTCCC | 4460 |
| 3970 | GACGCCAC A CUCCCCCU | 2133 | AGGGGGAG GGCTAGCTACAACGA GTGGCGTC | 4461 |
| 3991 | UCCAGGGG A CGCCACAC | 2130 | GTGTGGCG GGCTAGCTACAACGA CCCCTGGA | 4458 |
| 3993 | CAGGGGAC G CCACACUC | 2131 | GAGTGTGG GGCTAGCTACAACGA GTCCCCTG | 4459 |
| 3996 | GGGACGCC A CACUCGCC | 2135 | GGCGAGTC GGCTAGCTACAACGA GGCGTCCC | 4463 |
| 3998 | GACGCCAC A CUCGCCCU | 2136 | AGGGCGAG GGCTAGCTACAACGA GTGGCGTC | 4464 |
| 4002 | CCACACUC G CCCUUCUC | 2124 | GAGAAGGG GGCTAGCTACAACGA GAGTGTGG | 4452 |
| 4019 | UCCAGGGG A CGCCACAC | 2130 | GTGTGGCG GGCTAGCTACAACGA CCCCTGGA | 4458 |
| 4021 | CAGGGGAC G CCACACUC | 2131 | GAGTGTGG GGCTAGCTACAACGA GTCCCCTG | 4459 |
| 4024 | GGGACGCC A CACUCCCC | 2132 | GGGGAGTG GGCTAGCTACAACGA GGCGTCCC | 4460 |
| 4026 | GACGCCAC A CUCCCCCU | 2133 | AGGGGGAG GGCTAGCTACAACGA GTGGCGTC | 4461 |
| 4038 | CCCCUUCU G UCCAGGGG | 2134 | CCCCTGGA GGCTAGCTACAACGA AGAAGGGG | 4462 |
| 4047 | UCCAGGGG A CGCCACAC | 2130 | GTGTGGCG GGCTAGCTACAACGA CCCCTGGA | 4458 |
| 4049 | CAGGGGAC G CCACACUC | 2131 | GAGTGTGG GGCTAGCTACAACGA GTCCCCTG | 4459 |
| 4052 | GGGACGCC A CACUCGCC | 2135 | GGCGAGTG GGCTAGCTACAACGA GGCGTCCC | 4463 |
| 4054 | GACGCCAC A CUCGCCCU | 2136 | AGGGCGAG GGCTAGCTACAACGA GTGGCGTC | 4464 |
| 4058 | CCACACUC G CCCUUCUC | 2124 | GAGAAGGG GGCTAGCTACAACGA GAGTGTGG | 4452 |
| 4075 | UCCAGGGG A CGCCACAC | 2130 | GTGTGGCG GGCTAGCTACAACGA CCCCTGGA | 4458 |
| 4077 | CAGGGGAC G CCACACUC | 2131 | GAGTGTGG GGCTAGCTACAACGA GTCCCCTG | 4459 |
| 4080 | GGGACGCC A CACUCGCC | 2135 | GGCGAGTG GGCTAGCTACAACGA GGCGTCCC | 4463 |
| 4082 | GACGCCAC A CUCGCCCU | 2136 | AGGGCGAG GGCTAGCTACAACGA GTGGCGTC | 4464 |
| 4086 | CCACACUC G CCCUUCUC | 2124 | GAGAAGGG GGCTAGCTACAACGA GAGTGTGG | 4452 |
| 4103 | UCCAGGGG A CGCCACAC | 2130 | GTGTGGCG GGCTAGCTACAACGA CCCCTGGA | 4458 |
| 4105 | CAGGGGAC G CCACACUC | 2131 | GAGTGTGG GGCTAGCTACAACGA GTCCCCTG | 4459 |
| 4108 | GGGACGCC A CACUCCCC | 2132 | GGGGAGTG GGCTAGCTACAACGA GGCGTCCC | 4460 |
| 4110 | GACGCCAC A CUCCCCCU | 2133 | AGGGGGAG GGCTAGCTACAACGA GTGGCGTC | 4461 |
| 4131 | UCCAGGGG A CGCCACAC | 2130 | GTGTGGCG GGCTAGCTACAACGA CCCCTGGA | 4458 |
| 4133 | CAGGGGAC G CCACACUC | 2131 | GAGTGTGG GGCTAGCTACAACGA GTCCCCTG | 4459 |
| 4136 | GGGACGCC A CACUCCCC | 2132 | GGGGAGTG GGCTAGCTACAACGA GGCGTCCC | 4460 |
| 4138 | GACGCCAC A CUCCCCCU | 2133 | AGGGGGAG GGCTAGCTACAACGA GTGGCGTC | 4461 |
| 4159 | UCCAGGGG A CGCCACAC | 2130 | GTGTGGCG GGCTAGCTACAACGA CCCCTGGA | 4458 |
| 4161 | CAGGGGAC G CCACACUC | 2131 | GAGTGTGG GGCTAGCTACAACGA GTCCCCTG | 4459 |
| 4164 | GGGACGCC A CACUCCCC | 2132 | GGGGAGTG GGCTAGCTACAACGA GGCGTCCC | 4460 |
| 4166 | GACGCCAC A CUCCCCCU | 2133 | AGGGGGAG GGCTAGCTACAACGA GTGGCGTC | 4461 |
| 4178 | CCCCUUCU G UCCAGGGG | 2134 | CCCCTGGA GGCTAGCTACAACGA AGAAGGGG | 4462 |
| 4187 | UCCAGGGG A CGCCACAC | 2130 | GTGTGGCG GGCTAGCTACAACGA CCCCTGGA | 4458 |
| 4189 | CAGGGGAC G CCACACUC | 2131 | GAGTGTGG GGCTAGCTACAACGA GTCCCCTG | 4459 |
| 4192 | GGGACGCC A CACUCGCC | 2135 | GGCGAGTG GGCTAGCTACAACGA GGCGTCCC | 4463 |
| 4194 | GACGCCAC A CUCGCCCU | 2136 | AGGGCGAG GGCTAGCTACAACGA GTGGCGTC | 4464 |
| 4198 | CCACACUC G CCCUUCUC | 2124 | GAGAAGGG GGCTAGCTACAACGA GAGTGTGG | 4452 |
| 4215 | UCCAGGGG A CGCCACAC | 2130 | GTGTGGCG GGCTAGCTACAACGA CCCCTGGA | 4458 |
| 4217 | CAGGGGAC G CCACACUC | 2131 | GAGTGTGG GGCTAGCTACAACGA GTCCCCTG | 4459 |
| 4220 | GGGACGCC A CACUCCCC | 2132 | GGGGAGTG GGCTAGCTACAACGA GGCGTCCC | 4460 |
| 4222 | GACGCCAC A CUCCCCCU | 2133 | AGGGGGAG GGCTAGCTACAACGA GTGGCGTC | 4461 |
| 4243 | UCCAGGGG A CGCCACAC | 2130 | GTGTGGCG GGCTAGCTACAACGA CCCCTGGA | 4458 |
| 4245 | CAGGGGAC G CCACACUC | 2131 | GAGTGTGG GGCTAGCTACAACGA GTCCCCTG | 4459 |
| 4248 | GGGACGCC A CACUCCCC | 2132 | GGGGAGTG GGCTAGCTACAACGA GGCGTCCC | 4460 |
| 4250 | GACGCCAC A CUCCCCCU | 2133 | AGGGGGAG GGCTAGCTACAACGA GTGGCGTC | 4461 |
| 4271 | UCCAGGGG A CGCCACAC | 2130 | GTGTGGCG GGCTAGCTACAACGA CCCCTGGA | 4458 |
| 4273 | CAGGGGAC G CCACACUC | 2131 | GAGTGTGG GGCTAGCTACAACGA GTCCCCTG | 4459 |
| 4276 | GGGACGCC A CACUCCCC | 2132 | GGGGAGTG GGCTAGCTACAACGA GGCGTCCC | 4460 |
| 4278 | GACGCCAC A CUCCCCCU | 2133 | AGGGGGAG GGCTAGCTACAACGA GTGGCGTC | 4461 |
| 4290 | CCCCUUCU G UCCAGGGG | 2134 | CCCCTGGA GGCTAGCTACAACGA AGAAGGGG | 4462 |
| 4299 | UCCAGGGG A CGCCACAC | 2130 | GTGTGGCG GGCTAGCTACAACGA CCCCTGGA | 4458 |
| 4301 | CAGGGGAC G CCACACUC | 2131 | GAGTGTGG GGCTAGCTACAACGA GTCCCCTG | 4459 |
| 4304 | GGGACGCC A CACUCGCC | 2135 | GGCGAGTG GGCTAGCTACAACGA GGCGTCCC | 4463 |
| 4306 | GACGCCAC A CUCGCCCU | 2136 | AGGGCGAG GGCTAGCTACAACGA GTGGCGTC | 4464 |
| 4310 | CCACACUC G CCCUUCUC | 2124 | GAGAAGGG GGCTAGCTACAACGA GAGTGTGG | 4452 |
| 4327 | UCCAGGGG A CGCCACAC | 2130 | GTGTGGCG GGCTAGCTACAACGA CCCCTGGA | 4458 |
| 4329 | CAGGGGAC G CCACACUC | 2131 | GAGTGTGG GGCTAGCTACAACGA GTCCCCTG | 4459 |
| 4332 | GGGACGCC A CACUCGCC | 2135 | GGCGAGTG GGCTAGCTACAACGA GGCGTCCC | 4463 |
| 4334 | GACGCCAC A CUCGCCCU | 2136 | AGGGCGAG GGCTAGCTACAACGA GTGGCGTC | 4464 |
| 4338 | CCACACUC G CCCUUCUC | 2124 | GAGAAGGG GGCTAGCTACAACGA GAGTGTGG | 4452 |
| 4355 | UCCAGGGG A CGCCACAC | 2130 | GTGTGGCG GGCTAGCTACAACGA CCCCTGGA | 4458 |
| 4357 | CAGGGGAC G CCACACUC | 2131 | GAGTGTGG GGCTAGCTACAACGA GTCCCCTG | 4459 |
| 4360 | GGGACGCC A CACUCGCC | 2135 | GGCGAGTG GGCTAGCTACAACGA GGCGTCCC | 4463 |
| 4362 | GACGCCAC A CUCGCCCU | 2136 | AGGGCGAG GGCTAGCTACAACGA GTGGCGTC | 4464 |
| 4366 | CCACACUC G CCCUUCUC | 2124 | GAGAAGGG GGCTAGCTACAACGA GAGTGTGG | 4452 |
| 4383 | UCCAGGGG A CGCCACAC | 2130 | GTGTGGCG GGCTAGCTACAACGA CCCCTGGA | 4458 |
| 4385 | CAGGGGAC G CCACACUU | 2139 | AAGTGTGG GGCTAGCTACAACGA GTCCCCTG | 4467 |
| 4388 | GGGACGCC A CACUUGCC | 2140 | GGCAAGTG GGCTAGCTACAACGA GGCGTCCC | 4468 |
| 4390 | GACGCCAC A CUUGCCCU | 2141 | AGGGCAAG GGCTAGCTACAACGA GTGGCGTC | 4469 |
| 4394 | CCACACUU G CCCUUCUG | 2142 | CAGAAGGG GGCTAGCTACAACGA AAGTGTGG | 4470 |
| 4402 | GCCCUUCU G UCCAGGGA | 2143 | TCCCTGGA GGCTAGCTACAACGA AGAAGGGC | 4471 |
| 4411 | UCCAGGGA A UGCCACAC | 2144 | GTGTGGCA GGCTAGCTACAACGA TCCCTGGA | 4472 |
| 4413 | CAGGGAAU G CCACACUC | 2145 | GAGTGTGG GGCTAGCTACAACGA ATTCCCTG | 4449 |
| 4416 | GGAAUGCC A CACUCCCC | 2146 | GGGGAGTG GGCTAGCTACAACGA GGCATTCC | 4473 |
| 4418 | AAUGCCAC A CUCCCCCU | 2147 | AGGGGGAG GGCTAGCTACAACGA GTGGCATT | 4474 |
| 4435 | UCUCCCCA G CAGCCUCC | 2148 | GGAGGCTG GGCTAGCTACAACGA TGGGGAGA | 4475 |
| 4438 | CCCCAGCA G CCUCCGAG | 2149 | CTCGGAGG GGCTAGCTACAACGA TGCTGGGG | 4476 |
| 4446 | GCCUCCGA G UGACCAGC | 2150 | GCTGGTCA GGCTAGCTACAACGA TCGGAGGC | 4477 |
| 4449 | UCCGAGUG A CCAGCUUC | 2151 | GAAGCTGG GGCTAGCTACAACGA CACTCGGA | 4478 |
| 4453 | AGUGACCA G CUUCCCCA | 2152 | TGGGGAAG GGCTAGCTACAACGA TGGTCACT | 4479 |
| 4461 | GCUUCCCC A UCGAUAGA | 2153 | TCTATCGA GGCTAGCTACAACGA GGGGAAGC | 4480 |
| 4465 | CCCCAUCG A UAGACUUC | 2154 | GAAGTCTA GGCTAGCTACAACGA CGATGGGG | 4481 |
| 4469 | AUCGAUAG A CUUCCCGA | 2155 | TCGGGAAG GGCTAGCTACAACGA CTATCGAT | 4482 |
| 4479 | UUCCCGAG G CCAGGAGC | 2156 | GCTCCTGG GGCTAGCTACAACGA CTCGGGAA | 4483 |
| 4486 | GGCCAGGA G CCCUCUAG | 2157 | CTAGAGGG GGCTAGCTACAACGA TCCTGGCC | 4484 |
| 4496 | CCUCUAGG G CUGCCGGG | 2158 | CCCGGCAG GGCTAGCTACAACGA CCTAGAGG | 4485 |
| 4499 | CUAGGGCU G CCGGGUGC | 2159 | GCACCCGG GGCTAGCTACAACGA AGCCCTAG | 4486 |
| 4504 | GCUGCCGG G UGCCACCC | 2160 | GGGTGGCA GGCTAGCTACAACGA CCGGCAGC | 4487 |
| 4506 | UGCCGGGU G CCACCCUG | 2161 | CAGGGTGG GGCTAGCTACAACGA ACCCGGCA | 4488 |
| 4509 | CGGGUGCC A CCCUGGCU | 2162 | AGCCAGGG GGCTAGCTACAACGA GGCACCCG | 4489 |
| 4515 | CCACCCUG G CUCCUUCC | 2163 | GGAAGGAG GGCTAGCTACAACGA CAGGGTGG | 4490 |
| 4524 | CUCCUUCC A CACCGUGC | 2164 | GCACGGTG GGCTAGCTACAACGA GGAAGGAG | 4491 |
| 4526 | CCUUCCAC A CCGUGCUG | 2165 | CAGCACGG GGCTAGCTACAACGA GTGGAAGG | 4492 |
| 4529 | UCCACACC G UGCUGGUC | 2166 | GACCAGCA GGCTAGCTACAACGA GGTGTGGA | 4493 |
| 4531 | CACACCGU G CUGGUCAC | 2167 | GTGACCAG GGCTAGCTACAACGA ACGGTGTG | 4494 |
| 4535 | CCGUGCUG G UCACUGCC | 2168 | GGCAGTGA GGCTAGCTACAACGA CAGCACGG | 4495 |
| 4538 | UGCUGGUC A CUGCCUGC | 2169 | GCAGGCAG GGCTAGCTACAACGA GACCAGCA | 4496 |
| 4541 | UGGUCACU G CCUGCUGG | 2170 | CCAGCAGG GGCTAGCTACAACGA AGTGACCA | 4497 |
| 4545 | CACUGCCU G CUGGGGGC | 2171 | GCCCCCAG GGCTAGCTACAACGA AGGCAGTG | 4498 |
| 4552 | UGCUGGGG G CGUCAGAU | 2172 | ATCTGACG GGCTAGCTACAACGA CCCCAGCA | 4499 |
| 4554 | CUGGGGGC G UCAGAUGC | 2173 | GCATCTGA GGCTAGCTACAACGA GCCCCCAG | 4500 |
| 4559 | GGCGUCAG A UGCAGGUG | 2174 | CACCTGCA GGCTAGCTACAACGA CTGACGCC | 4501 |
| 4561 | CGUCAGAU G CAGGUGAC | 2175 | GTCACCTG GGCTAGCTACAACGA ATCTGACG | 4502 |
| 4565 | AGAUGCAG G UGACCCUG | 2176 | CAGGGTCA GGCTAGCTACAACGA CTGCATCT | 4503 |
| 4568 | UGCAGGUG A CCCUGUGC | 2177 | GCACAGGG GGCTAGCTACAACGA CACCTGCA | 4504 |
| 4573 | GUGACCCU G UGCAGGAG | 2178 | CTCCTGCA GGCTAGCTACAACGA AGGGTCAC | 4505 |
| 4575 | GACCCUGU G CAGGAGGU | 2179 | ACCTCCTG GGCTAGCTACAACGA ACAGGGTC | 4506 |
| 4582 | UGCAGGAG G UAUCUCUG | 2180 | CAGAGATA GGCTAGCTACAACGA CTCCTGCA | 4507 |
| 4584 | CAGGAGGU A UCUCUGGA | 2181 | TCCAGAGA GGCTAGCTACAACGA ACCTCCTG | 4508 |
| 4592 | AUCUCUGG A CCUGCCUC | 2182 | GAGGCAGG GGCTAGCTACAACGA CCAGAGAT | 4509 |
| 4596 | CUGGACCU G CCUCUUGG | 2183 | CCAAGAGG GGCTAGCTACAACGA AGGTCCAG | 4510 |
| 4604 | GCCUCUUG G UCAUUACG | 2184 | CGTAATGA GGCTAGCTACAACGA CAAGAGGC | 4511 |
| 4607 | UCUUGGUC A UUACGGGG | 2185 | CCCCGTAA GGCTAGCTACAACGA GACCAAGA | 4512 |
| 4610 | UGGUCAUU A CGGGGCUG | 2186 | CAGCCCCG GGCTAGCTACAACGA AATGACCA | 4513 |
| 4615 | AUUACGGG G CUGGGCAG | 2187 | CTGCCCAG GGCTAGCTACAACGA CCCGTAAT | 4514 |
| 4620 | GGGGCUGG G CAGGGCCU | 2188 | AGGCCCTG GGCTAGCTACAACGA CCAGCCCC | 4515 |
| 4625 | UGGGCAGG G CCUGGUAU | 2189 | ATACCAGG GGCTAGCTACAACGA CCTGCCCA | 4516 |
| 4630 | AGGGCCUG G UAUCAGGG | 2190 | CCCTGATA GGCTAGCTACAACGA CAGGCCCT | 4517 |
| 4632 | GGCCUGGU A UCAGGGCC | 2191 | GGCCCTGA GGCTAGCTACAACGA ACCAGGCC | 4518 |
| 4638 | GUAUCAGG G CCCCGCUG | 2192 | CAGCGGGG GGCTAGCTACAACGA CCTGATAC | 4519 |
| 4643 | AGGGCCCC G CUGGGGUU | 2193 | AACCCCAG GGCTAGCTACAACGA GGGGCCCT | 4520 |
| 4649 | CCGCUGGG G UUGCAGGG | 2194 | CCCTGCAA GGCTAGCTACAACGA CCCAGCGG | 4521 |
| 4652 | CUGGGGUU G CAGGGCUG | 2195 | CAGCCCTG GGCTAGCTACAACGA AACCCCAG | 4522 |
| 4657 | GUUGCAGG U CUGGGCCU | 2196 | AGGCCCAG GGCTAGCTACAACGA CCTGCAAC | 4523 |
| 4662 | AGGGCUGG G CCUGUGCU | 2197 | AGCACAGG GGCTAGCTACAACGA CCAGCCCT | 4524 |
| 4666 | CUGGGCCU G UGCUGUGG | 2198 | CCACAGCA GGCTAGCTACAACGA AGGCCCAG | 4525 |
| 4668 | GGGCCUGU G CUGUGGUC | 2199 | GACCACAG GGCTAGCTACAACGA ACAGGCCC | 4526 |
| 4671 | CCUGUGCU G UGGUCCUG | 2200 | CAGGACCA GGCTAGCTACAACGA AGCACAGG | 4527 |
| 4674 | GUGCUGUG G UCCUGGGG | 2201 | CCCCAGGA GGCTAGCTACAACGA CACAGCAC | 4528 |
| 4682 | GUCCUGUG G UGUCCAGG | 2202 | CCTGGACA GGCTAGCTACAACGA CCCAGGAC | 4529 |
| 4684 | CCUGGGGU G UCCAGGAC | 2203 | GTCCTGGA GGCTAGCTACAACGA ACCCCAGG | 4530 |
| 4691 | UGUCCAGG A CAGACGUG | 2204 | CACGTCTG GGCTAGCTACAACGA CCTGGACA | 4531 |
| 4695 | CAGGACAG A CGUGGAGG | 2205 | CCTCCACG GGCTAGCTACAACGA CTGTCCTG | 4532 |
| 4697 | GGACAGAC G UGGAGGGG | 2206 | CCCCTCCA GGCTAGCTACAACGA GTCTGTCC | 4533 |
| 4705 | GUGGAGGG G UCAGGGCC | 2207 | GGCCCTGA GGCTAGCTACAACGA CCCTCCAC | 4534 |
| 4711 | GGGUCAGG G CCCAGCAC | 2208 | GTGCTGGG GGCTAGCTACAACGA CCTGACCC | 4535 |
| 4716 | AGGGCCCA G CACCCCUG | 2209 | CAGGGGTG GGCTAGCTACAACGA TGGGCCCT | 4536 |
| 4718 | GGCCCAGC A CCCCUGCU | 2210 | AGCAGGGG GGCTAGCTACAACGA GCTGGGCC | 4537 |
| 4724 | GCACCCCU G CUCCAUGC | 2211 | GCATGGAG GGCTAGCTACAACGA AGGGGTGC | 4538 |
| 4729 | CCUGCUCC A UGCUGAAC | 2212 | GTTCAGCA GGCTAGCTACAACGA GGAGCAGG | 4539 |
| 4731 | UGCUCCAU G CUGAACUG | 2213 | CAGTTCAG GGCTAGCTACAACGA ATGGAGCA | 4540 |
| 4736 | CAUGCUGA A CUGUGGGA | 2214 | TCCCACAG GGCTAGCTACAACGA TCAGCATG | 4541 |
| 4739 | GCUGAACU G UGGGAAGC | 2215 | GCTTCCCA GGCTAGCTACAACGA AGTTCAGC | 4542 |
| 4746 | UGUGGGAA G CAUCCAGG | 2216 | CCTGGATG GGCTAGCTACAACGA TTCCCACA | 4543 |
| 4748 | UGGGAAGC A UCCAGGUC | 2217 | GACCTGGA GGCTAGCTACAACGA GCTTCCCA | 4544 |
| 4754 | GCAUCCAG G UCCCUGGG | 2218 | CCCAGGGA GGCTAGCTACAACGA CTGGATGC | 4545 |
| 4762 | GUCCCUGG G UGGCUUCA | 2219 | TGAAGCCA GGCTAGCTACAACGA CCAGGGAC | 4546 |
| 4765 | CCUGGGUG G CUUCAACA | 2220 | TGTTGAAG GGCTAGCTACAACGA CACCCAGG | 4547 |
| 4771 | UGGCUUCA A CAGGAGUU | 2221 | AACTCCTG GGCTAGCTACAACGA TGAAGCCA | 4548 |
| 4777 | CAACAGGA G UUCCAGCA | 2222 | TGCTGGAA GGCTAGCTACAACGA TCCTGTTG | 4549 |
| 4783 | GAGUUCCA G CACGGGAA | 2223 | TTCCCGTG GGCTAGCTACAACGA TGGAACTC | 4550 |
| 4785 | GUUCCAGC A CGGGAACC | 2224 | GGTTCCCG GGCTAGCTACAACGA GCTGGAAC | 4551 |
| 4791 | GCACGGGA A CCACUGGA | 2225 | TCCAGTGG GGCTAGCTACAACGA TCCCGTGC | 4552 |
| 4794 | CGGGAACC A CUGGACAA | 2226 | TTGTCCAG GGCTAGCTACAACGA GGTTCCCG | 4553 |
| 4799 | ACCACUGG A CAACCUGG | 2227 | CCAGGTTG GGCTAGCTACAACGA CCAGTGGT | 4554 |
| 4802 | ACUGGACA A CCUGGGGU | 2228 | ACCCCAGG GGCTAGCTACAACGA TGTCCAGT | 4555 |
| 4809 | AACCUGGG G UGUGUCCU | 2229 | AGGACACA GGCTAGCTACAACGA CCCAGGTT | 4556 |
| 4811 | CCUGGGGU C UGUCCUGA | 2230 | TCAGGACA GGCTAGCTACAACGA ACCCCAGG | 4557 |
| 4813 | UGGGGUGU G UCCUGAUC | 2231 | GATCAGGA GGCTAGCTACAACGA ACACCCCA | 4558 |
| 4819 | GUGUCCUG A UCUGGGGA | 2232 | TCCCCAGA GGCTAGCTACAACGA CAGGACAC | 4559 |
| 4827 | AUCUGGGG A CAGGCCAG | 2233 | CTGGCCTG GGCTAGCTACAACGA CCCCAGAT | 4560 |
| 4831 | GGGGACAG G CCAGCCAC | 2234 | GTGGCTGG GGCTAGCTACAACGA CTGTCCCC | 4561 |
| 4835 | ACAGGCCA G CCACACCC | 2235 | GGGTGTGG GGCTAGCTACAACGA TGGCCTGT | 4562 |
| 4838 | GGCCAGCC A CACCCCGA | 2236 | TCGGGGTG GGCTAGCTACAACGA GGCTGGCC | 4563 |
| 4840 | CCAGCCAC A CCCCGAGU | 2237 | ACTCGGGG GGCTAGCTACAACGA GTGGCTGG | 4564 |
| 4847 | CACCCCGA G UCCUAGGG | 2238 | CCCTAGGA GGCTAGCTACAACGA TCGGGGTG | 4565 |
| 4856 | UCCUAGGG A CUCCAGAG | 2239 | CTCTGGAG GGCTAGCTACAACGA CCCTAGGA | 4566 |
| 4866 | UCCAGAGA G CAGCCCAC | 2240 | GTGGGCTG GGCTAGCTACAACGA TCTCTGGA | 4567 |
| 4869 | AGAGAGCA G CCCACUGC | 2241 | GCAGTGGG GGCTAGCTACAACGA TGCTCTCT | 4568 |
| 4873 | AGCAGCCC A CUGCCCUG | 2242 | CAGGGCAG GGCTAGCTACAACGA GGGCTGCT | 4569 |
| 4876 | AGCCCACU G CCCUGGGC | 2243 | GCCCAGGG GGCTAGCTACAACGA AGTGGGCT | 4570 |
| 4883 | UGCCCUGG G CUCCACGG | 2244 | CCGTGGAG GGCTAGCTACAACGA CCAGGGCA | 4571 |
| 4888 | UGGGCUCC A CGGAAGCC | 2245 | GGCTTCCG GGCTAGCTACAACGA GGAGCCCA | 4572 |
| 4894 | CCACGGAA G CCCCCUCA | 2246 | TGAGGGGG GGCTAGCTACAACGA TTCCGTGG | 4573 |
| 4902 | GCCCCCUC A UGCCGCUA | 2247 | TAGCGGCA GGCTAGCTACAACGA GAGGGGGC | 4574 |
| 4904 | CCCCUCAU G CCGCUAGG | 2248 | CCTAGCGG GGCTAGCTACAACGA ATGAGGGG | 4575 |
| 4907 | CUCAUGCC G CUAGGCCU | 2249 | AGGCCTAG GGCTAGCTACAACGA GGCATGAG | 4576 |
| 4912 | GCCGCUAG G CCUUGGCC | 2250 | GGCCAAGG GGCTAGCTACAACGA CTAGCGGC | 4577 |
| 4918 | AGGCCUUG G CCUCGGGG | 2251 | CCCCGAGG GGCTAGCTACAACGA CAAGGCCT | 4578 |
| 4927 | CCUCGGGG A CAGCCCAG | 2252 | CTGGGCTG GGCTAGCTACAACGA CCCCGAGG | 4579 |
| 4930 | CGGGGACA G CCCAGCUA | 2253 | TAGCTGGG GGCTAGCTACAACGA TGTCCCCG | 4580 |
| 4935 | ACAGCCCA G CUAGGCCA | 2254 | TGGCCTAG GGCTAGCTACAACGA TGGGCTGT | 4581 |
| 4940 | CCAGCUAG G CCAGUGUG | 2255 | CACACTGG GGCTAGCTACAACGA CTAGCTGG | 4582 |
| 4944 | CUAGGCCA G UGUGUGGC | 2256 | GCCACACA GGCTAGCTACAACGA TGGCCTAG | 4583 |
| 4946 | AGGCCAGU G UGUGGCAG | 2257 | CTGCCACA GGCTAGCTACAACGA ACTGGCCT | 4584 |
| 4948 | GCCAGUGU G UGGCAGGA | 2258 | TCCTGCCA GGCTAGCTACAACGA ACACTGGC | 4585 |
| 4951 | AGUGUGUG G CAGGACCA | 2259 | TGGTCCTG GGCTAGCTACAACGA CACACACT | 4586 |
| 4956 | GUGGCAGG A CCAGGCCC | 2260 | GGGCCTGG GGCTAGCTACAACGA CCTGCCAC | 4587 |
| 4961 | AGGACCAG G CCCCCAUG | 2261 | CATGGGGG GGCTAGCTACAACGA CTGGTCCT | 4588 |
| 4967 | AGGCCCCC A UGUGGGAG | 2262 | CTCCCACA GGCTAGCTACAACGA GGGGGCCT | 4589 |
| 4969 | GCCCCCAU G UGGGAGCU | 2263 | AGCTCCCA GGCTAGCTACAACGA ATGGGGGC | 4590 |
| 4975 | AUGUGGGA G CUGACCCC | 2264 | GGGGTCAG GGCTAGCTACAACGA TCCCACAT | 4591 |
| 4979 | GGGAGCUG A CCCCUUGG | 2265 | CCAAGGGG GGCTAGCTACAACGA CAGCTCCC | 4592 |
| 4989 | CCCUUGGG A UUCUGGAG | 2266 | CTCCAGAA GGCTAGCTACAACGA CCCAAGGG | 4593 |
| 4997 | AUUCUGGA G CUGUGCUG | 2267 | CAGCACAG GGCTAGCTACAACGA TCCAGAAT | 4594 |
| 5000 | CUGGAGCU G UGCUGAUG | 2268 | CATCAGCA GGCTAGCTACAACGA AGCTCCAG | 4595 |
| 5002 | GGAGCUGU G CUGAUGGG | 2269 | CCCATCAG GGCTAGCTACAACGA ACAGCTCC | 4596 |
| 5006 | CUGUGCUG A UGGGCAGG | 2270 | CCTGCCCA GGCTAGCTACAACGA CAGCACAG | 4597 |
| 5010 | GCUGAUGG G CAGGGGAG | 2271 | CTCCCCTG GGCTAGCTACAACGA CCATCAGC | 4598 |
| 5020 | AGOGGAGA G CCAGCUCC | 2272 | GGAGCTGG GGCTAGCTACAACGA TCTCCCCT | 4599 |
| 5024 | GAGAGCCA G CUCCUCCC | 2273 | GGGAGGAG GGCTAGCTACAACGA TGGCTCTC | 4600 |
| 5044 | GAGGGAGG G UCUUGAUG | 2274 | CATCAAGA GGCTAGCTACAACGA CCTCCCTC | 4601 |
| 5050 | GGGUCUUG A UGCCUGGG | 2275 | CCCAGGCA GGCTAGCTACAACGA CAAGACCC | 4602 |
| 5052 | GUCUUGAU G CCUGGGGU | 2276 | ACCCCAGG GGCTAGCTACAACGA ATCAAGAC | 4603 |
| 5059 | UGCCUGGG G UUACCCGC | 2277 | GCGGGTAA GGCTAGCTACAACGA CCCAGGCA | 4604 |
| 5062 | CUGGGGUU A CCCGCAGA | 2278 | TCTGCGGG GGCTAGCTACAACGA AACCCCAG | 4605 |
| 5066 | GGUUACCC G CAGAGGCC | 2279 | GGCCTCTG GGCTAGCTACAACGA GGGTAACC | 4606 |
| 5072 | CCGCAGAG G CCUGGGUG | 2280 | CACCCAGG GGCTAGCTACAACGA CTCTGCGG | 4607 |
| 5078 | AGGCCUGG G UGCCGGGA | 2281 | TCCCGGCA GGCTAGCTACAACGA CCAGGCCT | 4608 |
| 5080 | GCCUGGGU G CCGGGACG | 2282 | CGTCCCGG GGCTAGCTACAACGA ACCCAGGC | 4609 |
| 5086 | GUGCCGGG A CGCUCCCC | 2283 | GGGGAGCG GGCTAGCTACAACGA CCCGGCAC | 4610 |
| 5088 | GCCGGGAC G CUCCCCGG | 2284 | CCGGGGAG GGCTAGCTACAACGA GTCCCGGC | 4611 |
| 5096 | GCUCCCCG G UUUGGCUG | 2285 | CAGCCAAA GGCTAGCTACAACGA CGGGGAGC | 4612 |
| 5101 | CCGGUUUG G CUGAAAGG | 2286 | CCTTTCAG GGCTAGCTACAACGA CAAACCGG | 4613 |
| 5113 | AAAGGAAA G CAGAUGUG | 2287 | CACATCTG GGCTAGCTACAACGA TTTCCTTT | 4614 |
| 5117 | GAAAGCAG A UGUGGUCA | 2288 | TGACCACA GGCTAGCTACAACGA CTGCTTTC | 4615 |
| 5119 | AAGCAGAU G UGGUCAGC | 2289 | GCTGACCA GGCTAGCTACAACGA ATCTGCTT | 4616 |
| 5122 | CAGAUGUG G UCAGCUUC | 2290 | GAAGCTGA GGCTAGCTACAACGA CACATCTG | 4617 |
| 5126 | UGUGGUCA G CUUCUCCA | 2291 | TGGAGAAG GGCTAGCTACAACGA TGACCACA | 4618 |
| 5134 | GCUUCUCC A CUGAGCCC | 2292 | GGGCTCAG GGCTAGCTACAACGA GGAGAAGC | 4619 |
| 5139 | UCCACUGA G CCCAUCUG | 2293 | CAGATGGG GGCTAGCTACAACGA TCAGTGGA | 4620 |
| 5143 | CUGAGCCC A UCUGGUCU | 2294 | AGACCAGA GGCTAGCTACAACGA GGGCTCAG | 4621 |
| 5148 | CCCAUCUG G UCUUCCCG | 2295 | CGGGAAGA GGCTAGCTACAACGA CAGATGGG | 4622 |
| 5159 | UUCCCGGG G CUGGGCCC | 2296 | GGGCCCAG GGCTAGCTACAACGA CCCGGGAA | 4623 |
| 5164 | GGGGCUGG G CCCCAUAG | 2297 | CTATGGGG GGCTAGCTACAACGA CCAGCCCC | 4624 |
| 5169 | UGGGCCCC A UAGAUCUG | 2298 | CAGATCTA GGCTAGCTACAACGA GGGGCCCA | 4625 |
| 5173 | CCCCAUAG A UCUGGGUC | 2299 | GACCCAGA GGCTAGCTACAACGA CTATGGGG | 4626 |
| 5179 | AGAUCUGG G UCCCUGUG | 2300 | CACAGGGA GGCTAGCTACAACGA CCAGATCT | 4627 |
| 5185 | GGGUCCCU G UGUGGCCC | 2301 | GGGCCACA GGCTAGCTACAACGA AGGGACCC | 4628 |
| 5187 | GUCCCUGU G UGGCCCCC | 2302 | GGGGGCCA GGCTAGCTACAACGA ACAGGGAC | 4629 |
| 5190 | CCUGUGUG G CCCCCCUG | 2303 | CAGGGGGG GGCTAGCTACAACGA CACACAGG | 4630 |
| 5199 | CCCCCCUG G UCUGAUGC | 2304 | GCATCAGA GGCTAGCTACAACGA CAGGGGGG | 4631 |
| 5204 | CUGGUCUG A UGCCGAGG | 2305 | CCTCGGCA GGCTAGCTACAACGA CAGACCAG | 4632 |
| 5206 | GGUCUGAU G CCGAGGAU | 2306 | ATCCTCGG GGCTAGCTACAACGA ATCAGACC | 4633 |
| 5213 | UGCCGAGG A UACCCCUG | 2307 | CAGGGGTA GGCTAGCTACAACGA CCTCGGCA | 4634 |
| 5215 | CCGAGGAU A CCCCUGCA | 2308 | TGCAGGGG GGCTAGCTACAACGA ATCCTCGG | 4635 |
| 5221 | AUACCCCU G CAAACUGC | 2309 | GCAGTTTG GGCTAGCTACAACGA AGGGGTAT | 4636 |
| 5225 | CCCUGCAA A CUGCCAAU | 2310 | ATTGGCAG GGCTAGCTACAACGA TTGCAGGG | 4637 |
| 5228 | UGCAAACU G CCAAUCCC | 2311 | GGGATTGG GGCTAGCTACAACGA AGTTTGCA | 4638 |
| 5232 | AACUGCCA A UCCCAGAG | 2312 | CTCTGGGA GGCTAGCTACAACGA TGGCAGTT | 4639 |
| 5242 | CCCAGAGG A CAAGACUG | 2313 | CAGTCTTG GGCTAGCTACAACGA CCTCTGGG | 4640 |
| 5247 | AGGACAAG A CUGGGAAG | 2314 | CTTCCCAG GGCTAGCTACAACGA CTTGTCCT | 4641 |
| 5255 | ACUGGGAA G UCCCUGCA | 2315 | TGCAGGGA GGCTAGCTACAACGA TTCCCAGT | 4642 |
| 5261 | AAGUCCCU G CAGGGAGA | 2316 | TCTCCCTG GGCTAGCTACAACGA AGGGACTT | 4643 |
| 5270 | CAGGGAGA G CCCAUCCC | 2317 | GGGATGGG GGCTAGCTACAACGA TCTCCCTG | 4644 |
| 5274 | GAGAGCCC A UCCCCGCA | 2318 | TGCGGGGA GGCTAGCTACAACGA GGGCTCTC | 4645 |
| 5280 | CCAUCCCC G CACCCUGA | 2319 | TCAGGGTG GGCTAGCTACAACGA GGGGATGG | 4646 |
| 5282 | AUCCCCGC A CCCUGACC | 2320 | GGTCAGGG GGCTAGCTACAACGA GCGGGGAT | 4647 |
| 5288 | GCACCCUG A CCCACAAG | 2321 | CTTGTGGG GGCTAGCTACAACGA CAGGGTGC | 4648 |
| 5292 | CCUGACCC A CAAGAGGG | 2322 | CCCTCTTG GGCTAGCTACAACGA GGGTCAGG | 4649 |
| 5301 | CAAGAGGG A CUCCUGCU | 2323 | AGCAGGAG GGCTAGCTACAACGA CCCTCTTG | 4650 |
| 5307 | GGACUCCU G CUGCCCAC | 2324 | GTGGGCAG GGCTAGCTACAACGA AGGAGTCC | 4651 |
| 5310 | CUCCUGCU G CCCACCAG | 2325 | CTGGTGGG GGCTAGCTACAACGA AGCAGGAG | 4652 |
| 5314 | UGCUGCCC A CCAGGCAU | 2326 | ATGCCTGG GGCTAGCTACAACGA GGGCAGCA | 4653 |
| 5319 | CCCACCAG G CAUCCCUC | 2327 | GAGGGATG GGCTAGCTACAACGA CTGGTGGG | 4654 |
| 5321 | CACCAGGC A UCCCUCCA | 2328 | TGGAGGGA GGCTAGCTACAACGA GCCTGGTG | 4655 |

Input Sequence = HUMRasH_mRNA.
Cut Site = R/Y
Arm Length = 8.
Core Sequence = GGCTAGCTACAACGA
HUMRasH_mRNA (Human c-Ha-ras1 proto-oncogene, spliced mRNA sequence; 5336 nt)

[0383] TABLE IV
Human HER2 DNAzyme and Substrate Sequence

| | | | | |
|---|---|---|---|---|
| | | Seq | | Seq |
| Pos | Substrate | ID | DNAzyme | ID |

| | | | | |
|---|---|---|---|---|
| 9 | AAGGGGAG G UAACCCUG | 4656 | CAGGGTTA GGCTAGCTACAACGA CTCCCCTT | 5644 |
| 12 | GGGAGGUA A CCCUGGCC | 4657 | GGCCAGGG GGCTAGCTACAACGA TACCTCCC | 5645 |
| 18 | UAACCCUG G CCCCUUUG | 4658 | CAAAGGGG GGCTAGCTACAACGA CAGGGTTA | 5646 |
| 27 | CCCCUUUG G UCGGGGCC | 4659 | GGCCCCGA GGCTAGCTACAACGA CAAAGGGG | 5647 |
| 33 | UGGUCGGG G CCCCGGGC | 4660 | GCCCGGGG GGCTAGCTACAACGA CCCGACCA | 5648 |
| 40 | GGCCCCGG G CAGCCGCG | 4661 | CGCGGCTG GGCTAGCTACAACGA CCGGGGCC | 5649 |
| 43 | CCCGGGCA G CCGCGCGC | 4662 | GCGCGCGG GGCTAGCTACAACGA TGCCCGGG | 5650 |
| 46 | GGGCAGCC G CGCGCCCC | 4663 | GGGGCGCG GGCTAGCTACAACGA GGCTGCCC | 5651 |
| 48 | GCAGCCGC G CGCCCCUU | 4664 | AAGGGGCG GGCTAGCTACAACGA GCGGCTGC | 5652 |
| 50 | AGCCGCGC G CCCCUUCC | 4665 | GGAAGGGG GGCTAGCTACAACGA GCGCGGCT | 5653 |
| 60 | CCCUUCCC A CGGGGCCC | 4666 | GGGCCCCG GGCTAGCTACAACGA GGGAAGGG | 5654 |
| 65 | CCCACGGG G CCCUUUAC | 4667 | GTAAAGGG GGCTAGCTACAACGA CCCGTGGG | 5655 |
| 72 | GGCCCUUU A CUGCGCCG | 4668 | CGGCGCAG GGCTAGCTACAACGA AAAGGGCC | 5656 |
| 75 | CCUUUACU G CGCCGCGC | 4669 | GCGCGGCG GGCTAGCTACAACGA AGTAAAGG | 5657 |
| 77 | UUUACUGC G CCGCGCGC | 4670 | GCGCGCGG GGCTAGCTACAACGA GCAGTAAA | 5658 |
| 80 | ACUGCGCC G CGCGCCCG | 4671 | CGGGCGCG GGCTAGCTACAACGA GGCGCAGT | 5659 |
| 82 | UGCGCCGC G CGCCCGGC | 4672 | GCCGGGCG GGCTAGCTACAACGA GCGGCGCA | 5660 |
| 84 | CGCCGCGC G CCCGGCCC | 4673 | GGGCCGGG GGCTAGCTACAACGA GCGCGGCG | 5661 |
| 89 | CGCGCCCG G CCCCCACC | 4674 | GGTGGGGG GGCTAGCTACAACGA CGGGCGCG | 5662 |
| 95 | CGGCCCCC A CCCCUCGC | 4675 | GCGAGGGG GGCTAGCTACAACGA GGGGGCCG | 5663 |
| 102 | CACCCCUC G CAGCACCC | 4676 | GGGTGCTG GGCTAGCTACAACGA GAGGGGTG | 5664 |
| 105 | CCCUCGCA G CACCCCGC | 4677 | GCGGGGTG GGCTAGCTACAACGA TGCGAGGG | 5665 |
| 107 | CUCGCAGC A CCCCGCGC | 4678 | GCGCGGGG GGCTAGCTACAACGA GCTGCGAG | 5666 |
| 112 | AGCACCCC G CGCCCCGC | 4679 | GCGGGGCG GGCTAGCTACAACGA GGGGTGCT | 5667 |
| 114 | CACCCCGC G CCCCGCGC | 4680 | GCGCGGGG GGCTAGCTACAACGA GCGGGGTG | 5668 |
| 119 | CGCGCCCC G CGCCCUCC | 4681 | GGAGGGCG GGCTAGCTACAACGA GGGGCGCG | 5669 |
| 121 | CGCCCCGC G CCCUCCCA | 4682 | TGGGAGGG GGCTAGCTACAACGA GCGGGGCG | 5670 |
| 130 | CCCUCCCA G CCGGGUCC | 4683 | GGACCCGG GGCTAGCTACAACGA TGGGAGGG | 5671 |
| 135 | CCAGCCGG G UCCAGCCG | 4684 | CGGCTGGA GGCTAGCTACAACGA CCGGCTGG | 5672 |
| 140 | CGGGUCCA G CCGGAGCC | 4685 | GGCTCCGG GGCTAGCTACAACGA TGGACCCG | 5673 |
| 146 | CAGCCGGA G CCAUGGGG | 4686 | CCCCATGG GGCTAGCTACAACGA TCCGGCTG | 5674 |
| 149 | CCGGAGCC A UGGGGCCG | 4687 | CGGCCCCA GGCTAGCTACAACGA GGCTCCGG | 5675 |
| 154 | GCCAUGGG G CCGGAGCC | 4688 | GGCTCCGG GGCTAGCTACAACGA CCCATGGC | 5676 |
| 160 | GGGCCGGA G CCGCAGUG | 4689 | CACTGCGG GGCTAGCTACAACGA TCCGGCCC | 5677 |
| 163 | CCGGAGCC G CAGUGAGC | 4690 | GCTCACTG GGCTAGCTACAACGA GGCTCCGG | 5678 |
| 166 | GAGCCGCA G UGAGCACC | 4691 | GGTGCTCA GGCTAGCTACAACGA TGCGGCTC | 5679 |
| 170 | CGCAGUGA G CACCAUGG | 4692 | CCATGGTG GGCTAGCTACAACGA TCACTGCG | 5680 |
| 172 | CAGUGAGC A CCAUGGAG | 4693 | CTCCATGG GGCTAGCTACAACGA GCTCACTG | 5681 |
| 175 | UGAGCACC A UGGAGCUG | 4694 | CAGCTCCA GGCTAGCTACAACGA GGTGCTCA | 5682 |
| 180 | ACCAUGGA G CUGGCGGC | 4695 | GCCGCCAG GGCTAGCTACAACGA TCCATGGT | 5683 |
| 184 | UGGAGCUG G CGGCCUUG | 4696 | CAAGGCCG GGCTAGCTACAACGA CAGCTCCA | 5684 |
| 187 | AGCUGGCG G CCUUGUGC | 4697 | GCACAAGG GGCTAGCTACAACGA CGCCAGCT | 5685 |
| 192 | GCGGCCUU G UGCCGCUG | 4698 | CAGCGGCA GGCTAGCTACAACGA AAGGCCGC | 5686 |
| 194 | GGCCUUGU G CCGCUGGG | 4699 | CCCAGCGG GGCTAGCTACAACGA ACAAGGCC | 5687 |
| 197 | CUUGUGCC G CUGGGGGC | 4700 | GCCCCCAG GGCTAGCTACAACGA GGCACAAG | 5688 |
| 204 | CGCUGGGG G CUCCUCCU | 4701 | AGGAGGAG GGCTAGCTACAACGA CCCCAGCG | 5689 |
| 214 | UCCUCCUC G CCCUCUUG | 4702 | CAAGAGGG GGCTAGCTACAACGA GAGGAGGA | 5690 |
| 222 | GCCCUCUU G CCCCCCGG | 4703 | CCGGGGGG GGCTAGCTACAACGA AAGAGGGC | 5691 |
| 232 | CCCCCGGA G CCGCGAGC | 4704 | GCTCGCGG GGCTAGCTACAACGA TCCGGGGG | 5692 |
| 235 | CCGGAGCC G CGAGCACC | 4705 | GGTGCTCG GGCTAGCTACAACGA GGCTCCGG | 5693 |
| 239 | AGCCGCGA G CACCCAAG | 4706 | CTTGGGTG GGCTAGCTACAACGA TCGCGGCT | 5694 |
| 241 | CCGCGAGC A CCCAAGUG | 4707 | CACTTGGG GGCTAGCTACAACGA GCTCGCGG | 5695 |
| 247 | GCACCCAA G UGUGCACC | 4708 | GGTGCACA GGCTAGCTACAACGA TTGGGTGC | 5696 |
| 249 | ACCCAAGU G UGCACCGG | 4709 | CCGGTGCA GGCTAGCTACAACGA ACTTGGGT | 5697 |
| 251 | CCAAGUGU G CACCGGCA | 4710 | TGCCGGTG GGCTAGCTACAACGA ACACTTGG | 5698 |
| 253 | AAGUGUGC A CCGGCACA | 4711 | TGTGCCGG GGCTAGCTACAACGA GCACACTT | 5699 |
| 257 | GUGCACCG G CACAGACA | 4712 | TGTCTGTG GGCTAGCTACAACGA CGGTGCAC | 5700 |
| 259 | GCACCGGC A CAGACAUG | 4713 | CATGTCTG GGCTAGCTACAACGA GCCGGTGC | 5701 |
| 263 | CGGCACAG A CAUGAAGC | 4714 | GCTTCATG GGCTAGCTACAACGA CTGTGCCG | 5702 |
| 265 | GCACAGAC A UGAAGCUG | 4715 | CAGCTTCA GGCTAGCTACAACGA GTCTGTGC | 5703 |
| 270 | GACAUGAA G CUGCGGCU | 4716 | AGCCGCAG GGCTAGCTACAACGA TTCATGTC | 5704 |
| 273 | AUGAAGCU G CGGCUCCC | 4717 | GGGAGCCG GGCTAGCTACAACGA AGCTTCAT | 5705 |
| 276 | AAGCUGCG G CUCCCUGC | 4718 | GCAGGGAG GGCTAGCTACAACGA CGCAGCTT | 5706 |
| 283 | GGCUCCCU G CCAGUCCC | 4719 | GGGACTGG GGCTAGCTACAACGA AGGGAGCC | 5707 |
| 287 | CCCUGCCA G UCCCGAGA | 4720 | TCTCGGGA GGCTAGCTACAACGA TGGCAGGG | 5708 |
| 295 | GUCCCGAG A CCCACCUG | 4721 | CAGGTGGG GGCTAGCTACAACGA CTCGGGAC | 5709 |
| 299 | CGAGACCC A CCUGGACA | 4722 | TGTCCAGG GGCTAGCTACAACGA GGGTCTCG | 5710 |
| 305 | CCACCUGG A CAUGCUCC | 4723 | GGAGCATG GGCTAGCTACAACGA CCAGGTGG | 5711 |
| 307 | ACCUGGAC A UGCUCCGC | 4724 | GCGGAGCA GGCTAGCTACAACGA GTCCAGGT | 5712 |
| 309 | CUGGACAU G CUCCGCCA | 4725 | TGGCGGAG GGCTAGCTACAACGA ATGTCCAG | 5713 |
| 314 | CAUGCUCC G CCACCUCU | 4726 | AGAGGTGG GGCTAGCTACAACGA GGAGCATG | 5714 |
| 317 | GCUCCGCC A CCUCUACC | 4727 | GGTAGAGG GGCTAGCTACAACGA GGCGGAGC | 5715 |
| 323 | CCACCUCU A CCAGGGCU | 4728 | AGCCCTGG GGCTAGCTACAACGA AGAGGTGG | 5716 |
| 329 | CUACCAGG G CUGCCAGG | 4729 | CCTGGCAG GGCTAGCTACAACGA CCTGGTAG | 5717 |
| 332 | CCAGGGCU G CCAGGUGG | 4730 | CCACCTGG GGCTAGCTACAACGA AGCCCTGG | 5718 |
| 337 | GCUGCCAG G UGGUGCAG | 4731 | CTGCACCA GGCTAGCTACAACGA CTGGCAGC | 5719 |
| 340 | GCCAGGUG G UGCAGGGA | 4732 | TCCCTGCA GGCTAGCTACAACGA CACCTGGC | 5720 |
| 342 | CAGGUGGU G CAGGGAAA | 4733 | TTTCCCTG GGCTAGCTACAACGA ACCACCTG | 5721 |
| 350 | GCAGGGAA A CCUGGAAC | 4734 | GTTCCAGG GGCTAGCTACAACGA TTCCCTGC | 5722 |
| 357 | AACCUGGA A CUCACCUA | 4735 | TAGGTGAG GGCTAGCTACAACGA TCCAGGTT | 5723 |
| 361 | UGGAACUC A CCUACCUG | 4736 | CAGGTAGG GGCTAGCTACAACGA GAGTTCCA | 5724 |
| 365 | ACUCACCU A CCUGCCCA | 4737 | TGGGCAGG GGCTAGCTACAACGA AGGTGAGT | 5725 |
| 369 | ACCUACCU G CCCACCAA | 4738 | TTGGTGGG GGCTAGCTACAACGA AGGTAGGT | 5726 |
| 373 | ACCUGCCC A CCAAUGCC | 4739 | GGCATTGG GGCTAGCTACAACGA GGGCAGGT | 5727 |
| 377 | GCCCACCA A UGCCAGCC | 4740 | GGCTGGCA GGCTAGCTACAACGA TGGTGGGC | 5728 |
| 379 | CCACCAAU G CCAGCCUG | 4741 | CAGGCTGG GGCTAGCTACAACGA ATTGGTGG | 5729 |
| 383 | CAAUGCCA G CCUGUCCU | 4742 | AGGACAGG GGCTAGCTACAACGA TGGCATTG | 5730 |
| 387 | GCCAGCCU G UCCUUCCU | 4743 | AGGAAGGA GGCTAGCTACAACGA AGGCTGGC | 5731 |
| 396 | UCCUUCCU G CAGGAUAU | 4744 | ATATCCTG GGCTAGCTACAACGA AGGAAGGA | 5732 |
| 401 | CCUGCAGG A UAUCCAGG | 4745 | CCTGGATA GGCTAGCTACAACGA CCTGCAGG | 5733 |
| 403 | UGCAGGAU A UCCAGGAG | 4746 | CTCCTGGA GGCTAGCTACAACGA ATCCTGCA | 5734 |
| 412 | UCCAGGAG G UGCAGGGC | 4747 | GCCCTGCA GGCTAGCTACAACGA CTCCTGGA | 5735 |
| 414 | CAGGAGGU G CAGGGCUA | 4748 | TAGCCCTG GGCTAGCTACAACGA ACCTCCTG | 5736 |
| 419 | GGUGCAGG G CUACGUGC | 4749 | GCACGTAG GGCTAGCTACAACGA CCTGCACC | 5737 |
| 422 | GCAGGGCU A CGUGCUCA | 4750 | TGAGCACG GGCTAGCTACAACGA AGCCCTGC | 5738 |
| 424 | AGGGCUAC G UGCUCAUC | 4751 | GATGAGCA GGCTAGCTACAACGA GTAGCCCT | 5739 |
| 426 | GGCUACGU G CUCAUCGC | 4752 | GCGATGAG GGCTAGCTACAACGA ACGTAGCC | 5740 |
| 430 | ACGUGCUC A UCGCUCAC | 4753 | GTGAGCGA GGCTAGCTACAACGA GAGCACGT | 5741 |
| 433 | UGCUCAUC G CUCACAAC | 4754 | GTTGTGAG GGCTAGCTACAACGA GATGAGCA | 5742 |
| 437 | CAUCGCUC A CAACCAAG | 4755 | CTTGGTTG GGCTAGCTACAACGA GAGCGATG | 5743 |
| 440 | CGCUCACA A CCAAGUGA | 4756 | TCACTTGG GGCTAGCTACAACGA TGTGAGCG | 5744 |
| 445 | ACAACCAA G UGAGGCAG | 4757 | CTGCCTCA GGCTAGCTACAACGA TTGGTTGT | 5745 |
| 450 | CAAGUGAG G CAGGUCCC | 4758 | GGGACCTG GGCTAGCTACAACGA CTCACTTG | 5746 |
| 454 | UGAGGCAG G UCCCACUG | 4759 | CAGTGGGA GGCTAGCTACAACGA CTGCCTCA | 5747 |
| 459 | CAGGUCCC A CUGCAGAG | 4760 | CTCTGCAG GGCTAGCTACAACGA GGGACCTG | 5748 |
| 462 | GUCCCACU G CAGAGGCU | 4761 | AGCCTCTG GGCTAGCTACAACGA AGTGGGAC | 5749 |
| 468 | CUGCAGAG G CUGCGGAU | 4762 | ATCCGCAG GGCTAGCTACAACGA CTCTGCAG | 5750 |
| 471 | CAGAGGCU G CGGAUUGU | 4763 | ACAATCCG GGCTAGCTACAACGA AGCCTCTG | 5751 |
| 475 | GGCUGCGG A UUGUGCGA | 4764 | TCGCACAA GGCTAGCTACAACGA CCGCAGCC | 5752 |
| 478 | UGCGGAUU G UGCGAGGC | 4765 | GCCTCGCA GGCTAGCTACAACGA AATCCGCA | 5753 |
| 480 | CGGAUUGU G CGAGGCAC | 4766 | GTGCCTCG GGCTAGCTACAACGA ACAATCCG | 5754 |
| 485 | UGUGCGAG G CACCCAGC | 4767 | GCTGGGTG GGCTAGCTACAACGA CTCGCACA | 5755 |
| 487 | UGCGAGGC A CCCAGCUC | 4768 | GAGCTGGG GGCTAGCTACAACGA GCCTCGCA | 5756 |
| 492 | GGCACCCA G CUCUUUGA | 4769 | TCAAAGAG GGCTAGCTACAACGA TGGGTGCC | 5757 |
| 503 | CUUUGAGG A CAACUAUG | 4770 | CATAGTTG GGCTAGCTACAACGA CCTCAAAG | 5758 |
| 506 | UGAGGACA A CUAUGCCC | 4771 | GGGCATAG GGCTAGCTACAACGA TGTCCTCA | 5759 |
| 509 | GGACAACU A UGCCCUGG | 4772 | CCAGGGCA GGCTAGCTACAACGA AGTTGTCC | 5760 |
| 511 | ACAACUAU G CCCUGGCC | 4773 | GGCCAGGG GGCTAGCTACAACGA ATAGTTGT | 5761 |
| 517 | AUGCCCUG G CCGUGCUA | 4774 | TAGCACGG GGCTAGCTACAACGA CAGGGCAT | 5762 |
| 520 | CCCUGGCC G UGCUAGAC | 4775 | GTCTAGCA GGCTAGCTACAACGA GGCCAGGG | 5763 |
| 522 | CUGGCCGU G CUAGACAA | 4776 | TTGTCTAG GGCTAGCTACAACGA ACGGCCAG | 5764 |
| 527 | CGUGCUAG A CAAUGGAG | 4777 | CTCCATTG GGCTAGCTACAACGA CTAGCACG | 5765 |
| 530 | GCUAGACA A UGGAGACC | 4778 | GGTCTCCA GGCTAGCTACAACGA TGTCTAGC | 5766 |
| 536 | CAAUGGAG A CCCGCUGA | 4779 | TCAGCGGG GGCTAGCTACAACGA CTCCATTG | 5767 |
| 540 | GGAGACCC G CUGAACAA | 4780 | TTGTTCAG GGCTAGCTACAACGA GGGTCTCC | 5768 |
| 545 | CCCGCUGA A CAAUACCA | 4781 | TGGTATTG GGCTAGCTACAACGA TCAGCGGG | 5769 |
| 548 | GCUGAACA A UACCACCC | 4782 | GGGTGGTA GGCTAGCTACAACGA TGTTCAGC | 5770 |
| 550 | UGAACAAU A CCACCCCU | 4783 | AGGGGTGG GGCTAGCTACAACGA ATTGTTCA | 5771 |
| 553 | ACAAUACC A CCCCUGUC | 4784 | GACAGGGG GGCTAGCTACAACGA GGTATTGT | 5772 |
| 559 | CCACCCCU G UCACAGGG | 4785 | CCCTGTGA GGCTAGCTACAACGA AGGGGTGG | 5773 |
| 562 | CCCCUGUC A CAGGGGCC | 4786 | GGCCCCTG GGCTAGCTACAACGA GACAGGGG | 5774 |
| 568 | UCACAGGG G CCUCCCCA | 4787 | TGGGGAGG GGCTAGCTACAACGA CCCTGTGA | 5775 |
| 581 | CCCAGGAG G CCUGCGGG | 4788 | CCCGCAGG GGCTAGCTACAACGA CTCCTGGG | 5776 |
| 585 | GGAGGCCU G CGGGAGCU | 4789 | AGCTCCCG GGCTAGCTACAACGA AGGCCTCC | 5777 |
| 591 | CUGCGGGA G CUGCAGCU | 4790 | AGCTGCAG GGCTAGCTACAACGA TCCCGCAG | 5778 |
| 594 | CGGGAGCU G CAGCUUCG | 4791 | CGAAGCTG GGCTAGCTACAACGA AGCTCCCG | 5779 |
| 597 | GAGCUGCA G CUUCGAAG | 4792 | CTTCGAAG GGCTAGCTACAACGA TGCAGCTC | 5780 |
| 605 | GCUUCGAA G CCUCACAG | 4793 | CTGTGAGG GGCTAGCTACAACGA TTCGAAGC | 5781 |
| 610 | GAAGCCUC A CAGAGAUC | 4794 | GATCTCTG GGCTAGCTACAACGA GAGGCTTC | 5782 |
| 616 | UCACAGAG A UCUUGAAA | 4795 | TTTCAAGA GGCTAGCTACAACGA CTCTGTGA | 5783 |
| 631 | AAGGAGGG G UCUUGAUC | 4796 | GATCAAGA GGCTAGCTACAACGA CCCTCCTT | 5784 |
| 637 | GGGUCUUG A UCCAGCGG | 4797 | CCGCTGGA GGCTAGCTACAACGA CAAGACCC | 5785 |
| 642 | UUGAUCCA G CGGAACCC | 4798 | GGGTTCCG GGCTAGCTACAACGA TGGATCAA | 5786 |
| 647 | CCAGCGGA A CCCCCAGC | 4799 | GCTGGGGG GGCTAGCTACAACGA TCCGCTGG | 5787 |
| 654 | AACCCCCA G CUCUGCUA | 4800 | TAGCAGAG GGCTAGCTACAACGA TGGGGGTT | 5788 |
| 659 | CCAGCUCU G CUACCAGG | 4801 | CCTGGTAG GGCTAGCTACAACGA AGAGCTGG | 5789 |
| 662 | GCUCUGCU A CCAGGACA | 4802 | TGTCCTGG GGCTAGCTACAACGA AGCAGAGC | 5790 |
| 668 | CUACCAGG A CACGAUUU | 4803 | AAATCGTG GGCTAGCTACAACGA CCTGGTAG | 5791 |
| 670 | ACCAGGAC A CGAUUUUG | 4804 | CAAAATCG GGCTAGCTACAACGA GTCCTGGT | 5792 |
| 673 | AGGACACG A UUUUGUGG | 4805 | CCACAAAA GGCTAGCTACAACGA CGTGTCCT | 5793 |
| 678 | ACGAUUUU G UGGAAGGA | 4806 | TCCTTCCA GGCTAGCTACAACGA AAAATCGT | 5794 |
| 686 | GUGGAAGG A CAUCUUCC | 4807 | GGAAGATG GGCTAGCTACAACGA CCTTCCAC | 5795 |
| 688 | GGAAGGAC A UCUUCCAC | 4808 | GTGGAAGA GGCTAGCTACAACGA GTCCTTCC | 5796 |
| 695 | CAUCUUCC A CAAGAACA | 4809 | TGTTCTTG GGCTAGCTACAACGA GGAAGATG | 5797 |
| 701 | CCACAAGA A CAACCAGC | 4810 | GCTGGTTG GGCTAGCTACAACGA TCTTGTGG | 5798 |
| 704 | CAAGAACA A CCAGCUGG | 4811 | CCAGCTGG GGCTAGCTACAACGA TGTTCTTG | 5799 |
| 708 | AACAACCA G CUGGCUCU | 4812 | AGAGCCAG GGCTAGCTACAACGA TGGTTGTT | 5800 |
| 712 | ACCAGCUG G CUCUCACA | 4813 | TGTGAGAG GGCTAGCTACAACGA CAGCTGGT | 5801 |
| 718 | UGGCUCUC A CACUGAUA | 4814 | TATCAGTG GGCTAGCTACAACGA GAGAGCCA | 5802 |
| 720 | GCUCUCAC A CUGAUAGA | 4815 | TCTATCAG GGCTAGCTACAACGA GTGAGAGC | 5803 |
| 724 | UCACACUG A UAGACACC | 4816 | GGTGTCTA GGCTAGCTACAACGA CAGTGTGA | 5804 |
| 728 | ACUGAUAG A CACCAACC | 4817 | GGTTGGTG GGCTAGCTACAACGA CTATCAGT | 5805 |
| 730 | UGAUAGAC A CCAACCGC | 4818 | GCGGTTGG GGCTAGCTACAACGA GTCTATCA | 5806 |
| 734 | AGACACCA A CCGCUCUC | 4819 | GAGAGCGG GGCTAGCTACAACGA TGGTGTCT | 5807 |
| 737 | CACCAACC G CUCUCGGG | 4820 | CCCGAGAG GGCTAGCTACAACGA GGTTGGTG | 5808 |
| 745 | GCUCUCGG G CCUGCCAC | 4821 | GTGGCAGG GGCTAGCTACAACGA CCGAGAGC | 5809 |
| 749 | UCGGGCCU G CCACCCCU | 4822 | AGGGGTGG GGCTAGCTACAACGA AGGCCCGA | 5810 |
| 752 | GGCCUGCC A CCCCUGUU | 4823 | AACAGGGG GGCTAGCTACAACGA GGCAGGCC | 5811 |
| 758 | CCACCCCU G UUCUCCGA | 4824 | TCGGAGAA GGCTAGCTACAACGA AGGGGTGG | 5812 |
| 766 | GUUCUCCG A UGUGUAAG | 4825 | CTTACACA GGCTAGCTACAACGA CGGAGAAC | 5813 |
| 768 | UCUCCGAU G UGUAAGGG | 4826 | CCCTTACA GGCTAGCTACAACGA ATCGGAGA | 5814 |
| 770 | UCCGAUGU G UAAGGGCU | 4827 | AGCCCTTA GGCTAGCTACAACGA ACATCGGA | 5815 |
| 776 | GUGUAAGG G CUCCCGCU | 4828 | AGCGGGAG GGCTAGCTACAACGA CCTTACAC | 5816 |
| 782 | GGGCUCCC G CUGCUGGG | 4829 | CCCAGCAG GGCTAGCTACAACGA GGGAGCCC | 5817 |
| 785 | CUCCCGCU G CUGGGGAG | 4830 | CTCCCCAG GGCTAGCTACAACGA AGCGGGAG | 5818 |
| 797 | GGGAGAGA G UUCUGAGG | 4831 | CCTCAGAA GGCTAGCTACAACGA TCTCTCCC | 5819 |
| 806 | UUCUGAGG A UUGUCAGA | 4832 | TCTGACAA GGCTAGCTACAACGA CCTCAGAA | 5820 |
| 809 | UGAGGAUU G UCAGAGCC | 4833 | GGCTCTGA GGCTAGCTACAACGA AATCCTCA | 5821 |
| 815 | UUGUCAGA G CCUGACGC | 4834 | GCGTCAGG GGCTAGCTACAACGA TCTGACAA | 5822 |
| 820 | AGAGCCUG A CGCGCACU | 4835 | AGTGCGCG GGCTAGCTACAACGA CAGGCTCT | 5823 |
| 822 | AGCCUGAC G CGCACUGU | 4836 | ACAGTGCG GGCTAGCTACAACGA GTCAGGCT | 5824 |
| 824 | CCUGACGC G CACUGUCU | 4837 | AGACAGTG GGCTAGCTACAACGA GCGTCAGG | 5825 |
| 826 | UGACGCGC A CUGUCUGU | 4838 | ACAGACAG GGCTAGCTACAACGA GCGCGTCA | 5826 |
| 829 | CGCGCACU G UCUGUGCC | 4839 | GGCACAGA GGCTAGCTACAACGA AGTGCGCG | 5827 |
| 833 | CACUGUCU G UGCCGGUG | 4840 | CACCGGCA GGCTAGCTACAACGA AGACAGTG | 5828 |
| 835 | CUGUCUGU G CCGGUGGC | 4841 | GCCACCGG GGCTAGCTACAACGA ACAGACAG | 5829 |
| 839 | CUGUGCCG G UGGCUGUG | 4842 | CACAGCCA GGCTAGCTACAACGA CGGCACAG | 5830 |
| 842 | UGCCGGUG G CUGUGCCC | 4843 | GGGCACAG GGCTAGCTACAACGA CACCGGCA | 5831 |
| 845 | CGGUGGCU G UGCCCGCU | 4844 | AGCGGGCA GGCTAGCTACAACGA AGCCACCG | 5832 |
| 847 | GUGGCUGU G CCCGCUGC | 4845 | GCAGCGGG GGCTAGCTACAACGA ACAGCCAC | 5833 |
| 851 | CUGUGCCC G CUCCAAGG | 4846 | CCTTGCAG GGCTAGCTACAACGA GGGCACAG | 5834 |
| 854 | UGCCCGCU G CAAGGGGC | 4847 | GCCCCTTG GGCTAGCTACAACGA AGCGGGCA | 5835 |
| 861 | UGCAAGGG G CCACUGCC | 4848 | GGCAGTGG GGCTAGCTACAACGA CCCTTGCA | 5836 |
| 864 | AAGGGGCC A CUGCCCAC | 4849 | GTGGGCAG GGCTAGCTACAACGA GGCCCCTT | 5837 |
| 867 | GGGCCACU G CCCACUGA | 4850 | TCAGTGGG GGCTAGCTACAACGA AGTGGCCC | 5838 |
| 871 | CACUGCCC A CUCACUGC | 4851 | GCAGTCAG GGCTAGCTACAACGA GGGCAGTG | 5839 |
| 875 | GCCCACUG A CUGCUGCC | 4852 | GGCACCAG GGCTAGCTACAACGA CAGTGGGC | 5840 |
| 878 | CACUGACU G CUGCCAUG | 4853 | CATGGCAG GGCTAGCTACAACGA AGTCACTG | 5841 |
| 881 | UGACUGCU G CCAUGAGC | 4854 | GCTCATGG GGCTAGCTACAACGA AGCAGTCA | 5842 |
| 884 | CUGCUGCC A UGAGCAGU | 4855 | ACTGCTCA GGCTAGCTACAACGA GGCAGCAG | 5843 |
| 888 | UGCCAUGA G CAGUGUGC | 4856 | GCACACTG GGCTAGCTACAACGA TCATGGCA | 5844 |
| 891 | CAUGAGCA G UGUGCUGC | 4857 | GCAGCACA GGCTAGCTACAACGA TGCTCATG | 5845 |
| 893 | UGAGCAGU G UGCUGCCG | 4858 | CGGCAGCA GGCTAGCTACAACGA ACTGCTCA | 5846 |
| 895 | AGCAGUGU G CUGCCGGC | 4859 | GCCGGCAG GGCTAGCTACAACGA ACACTGCT | 5847 |
| 898 | AGUGUGCU G CCGGCUGC | 4860 | GCAGCCGG GGCTAGCTACAACGA AGCACACT | 5848 |
| 902 | UGCUGCCG G CUGCACGG | 4861 | CCGTGCAG GGCTAGCTACAACGA CGGCAGCA | 5849 |
| 905 | UGCCGGCU G CACGGGCC | 4862 | GGCCCGTG GGCTAGCTACAACGA AGCCGGCA | 5850 |
| 907 | CCGGCUGC A CGGGCCCC | 4863 | GGGGCCCG GGCTAGCTACAACGA GCAGCCGG | 5851 |
| 911 | CUGCACGG G CCCCAAGC | 4864 | GCTTGGGG GGCTAGCTACAACGA CCGTGCAG | 5852 |
| 918 | GGCCCCAA G CACUCUGA | 4865 | TCAGAGTG GGCTAGCTACAACGA TTGGGGCC | 5853 |
| 920 | CCCCAAGC A CUCUGACU | 4866 | AGTCAGAG GGCTAGCTACAACGA GCTTGGGG | 5854 |
| 926 | GCACUCUG A CUGCCUGG | 4867 | CCAGGCAG GGCTAGCTACAACGA CAGAGTGC | 5855 |
| 929 | CUCUGACU G CCUGGCCU | 4868 | AGGCCAGG GGCTAGCTACAACGA AGTCAGAG | 5856 |
| 934 | ACUGCCUG G CCUGCCUC | 4869 | GAGGCAGG GGCTAGCTACAACGA CAGGCAGT | 5857 |
| 938 | CCUGGCCU G CCUCCACU | 4870 | AGTGGAGG GGCTAGCTACAACGA AGGCCAGG | 5858 |
| 944 | CUGCCUCC A CUUCAACC | 4871 | GGTTGAAG GGCTAGCTACAACGA GGAGGCAG | 5859 |
| 950 | CCACUUCA A CCACAGUG | 4872 | CACTGTGG GGCTAGCTACAACGA TGAAGTGG | 5860 |
| 953 | CUUCAACC A CAGUGGCA | 4873 | TGCCACTG GGCTAGCTACAACGA GGTTGAAG | 5861 |
| 956 | CAACCACA G UGGCAUCU | 4874 | AGATGCCA GGCTAGCTACAACGA TGTGGTTG | 5862 |
| 959 | CCACAGUG G CAUCUGUG | 4875 | CACAGATG GGCTAGCTACAACGA CACTGTGG | 5863 |
| 961 | ACAGUGGC A UCUGUGAG | 4876 | CTCACAGA GGCTAGCTACAACGA GCCACTGT | 5864 |
| 965 | UGGCAUCU G UGAGCUGC | 4877 | GCAGCTCA GGCTAGCTACAACGA AGATGCCA | 5865 |
| 969 | AUCUGUGA G CUGCACUG | 4878 | CAGTGCAG GGCTAGCTACAACGA TCACAGAT | 5866 |
| 972 | UGUGAGCU G CACUGCCC | 4879 | GGGCAGTG GGCTAGCTACAACGA AGCTCACA | 5867 |
| 974 | UGAGCUGC A CUGCCCAG | 4880 | CTGGGCAG GGCTAGCTACAACGA GCAGCTCA | 5868 |
| 977 | GCUGCACU G CCCAGCCC | 4881 | GGGCTGGG GGCTAGCTACAACGA AGTGCAGC | 5869 |
| 982 | ACUGCCCA G CCCUGGUC | 4882 | GACCAGGG GGCTAGCTACAACGA TGGGCAGT | 5870 |
| 988 | CAGCCCUG G UCACCUAC | 4883 | GTAGGTGA GGCTAGCTACAACGA CAGGGCTG | 5871 |
| 991 | CCCUGGUC A CCUACAAC | 4884 | GTTGTAGG GGCTAGCTACAACGA GACCAGGG | 5872 |
| 995 | GGUCACCU A CAACACAG | 4885 | CTGTGTTG GGCTAGCTACAACGA AGGTGACC | 5873 |
| 998 | CACCUACA A CACAGACA | 4886 | TGTCTGTG GGCTAGCTACAACGA TGTAGGTG | 5874 |
| 1000 | CCUACAAC A CAGACACG | 4887 | CGTGTCTG GGCTAGCTACAACGA GTTGTAGG | 5875 |
| 1004 | CAACACAG A CACGUUUG | 4888 | CAAACGTG GGCTAGCTACAACGA CTGTGTTG | 5876 |
| 1006 | ACACAGAC A CGUUUGAG | 4889 | CTCAAACG GGCTAGCTACAACGA GTCTGTGT | 5877 |
| 1008 | ACAGACAC G UUUGAGUC | 4890 | GACTCAAA GGCTAGCTACAACGA GTGTCTGT | 5878 |
| 1014 | ACGUUUGA G UCCAUGCC | 4891 | GGCATGGA GGCTAGCTACAACGA TCAAACGT | 5879 |
| 1018 | UUGAGUCC A UGCCCAAU | 4892 | ATTGGGCA GGCTAGCTACAACGA GGACTCAA | 5880 |
| 1020 | GAGUCCAU G CCCAAUCC | 4893 | GGATTGGG GGCTAGCTACAACGA ATGGACTC | 5881 |
| 1025 | CAUGCCCA A UCCCGAGG | 4894 | CCTCGGGA GGCTAGCTACAACGA TGGGCATG | 5882 |
| 1034 | UCCCGAGG G CCGGUAUA | 4895 | TATACCGG GGCTAGCTACAACGA CCTCGGGA | 5883 |
| 1038 | GAGGGCCG G UAUACAUU | 4896 | AATGTATA GGCTAGCTACAACGA CGGCCCTC | 5884 |
| 1040 | GGGCCGGU A UACAUUCG | 4897 | CGAATGTA GGCTAGCTACAACGA ACCGGCCC | 5885 |
| 1042 | GCCGGUAU A CAUUCGGC | 4898 | GCCGAATG GGCTAGCTACAACGA ATACCGGC | 5886 |
| 1044 | CGGUAUAC A UUCGGCGC | 4899 | GCGCCGAA GGCTAGCTACAACGA GTATACCG | 5887 |
| 1049 | UACAUUCG G CGCCAGCU | 4900 | AGCTGGCG GGCTAGCTACAACGA CGAATGTA | 5888 |
| 1051 | CAUUCGGC G CCAGCUGU | 4901 | ACAGCTGG GGCTAGCTACAACGA GCCGAATG | 5889 |
| 1055 | CGGCGCCA G CUGUGUGA | 4902 | TCACACAG GGCTAGCTACAACGA TGGCGCCG | 5890 |
| 1058 | CGCCAGCU G UGUGACUG | 4903 | CAGTCACA GGCTAGCTACAACGA AGCTGGCG | 5891 |
| 1060 | CCAGCUGU G UGACUGCC | 4904 | GGCAGTCA GGCTAGCTACAACGA ACAGCTGG | 5892 |
| 1063 | GCUGUGUG A CUGCCUGU | 4905 | ACAGGCAG GGCTAGCTACAACGA CACACAGC | 5893 |
| 1066 | GUGUGACU G CCUGUCCC | 4906 | GGGACAGG GGCTAGCTACAACGA AGTCACAC | 5894 |
| 1070 | GACUGCCU G UCCCUACA | 4907 | TGTAGGGA GGCTAGCTACAACGA AGGCAGTC | 5895 |
| 1076 | CUGUCCCU A CAACUACC | 4908 | GGTAGTTG GGCTAGCTACAACGA AGGGACAG | 5896 |
| 1079 | UCCCUACA A CUACCUUU | 4909 | AAAGGTAG GGCTAGCTACAACGA TGTAGGGA | 5897 |
| 1082 | CUACAACU A CCUUUCUA | 4910 | TAGAAAGG GGCTAGCTACAACGA AGTTGTAG | 5898 |
| 1090 | ACCUUUCU A CGGACGUG | 4911 | CACGTCCG GGCTAGCTACAACGA AGAAAGGT | 5899 |
| 1094 | UUCUACGG A CGUGGGAU | 4912 | ATCCCACG GGCTAGCTACAACGA CCGTAGAA | 5900 |
| 1096 | CUACGGAC G UGGGAUCC | 4913 | GGATCCCA GGCTAGCTACAACGA GTCCGTAG | 5901 |
| 1101 | GACGUGGG A UCCUGCAC | 4914 | GTGCAGGA GGCTAGCTACAACGA CCCACGTC | 5902 |
| 1106 | GGGAUCCU G CACCCUCG | 4915 | CGAGGGTG GGCTAGCTACAACGA AGGATCCC | 5903 |
| 1108 | GAUCCUGC A CCCUCGUC | 4916 | GACGAGGG GGCTAGCTACAACGA GCAGGATC | 5904 |
| 1114 | GCACCCUC G UCUGCCCC | 4917 | GGGGCAGA GGCTAGCTACAACGA GAGGGTGC | 5905 |
| 1118 | CCUCGUCU G CCCCCUGC | 4918 | GCAGGGGG GGCTAGCTACAACGA AGACGAGG | 5906 |
| 1125 | UGCCCCCU G CACAACCA | 4919 | TGGTTGTG GGCTAGCTACAACGA AGGGGGCA | 5907 |
| 1127 | CCCCCUGC A CAACCAAG | 4920 | CTTGGTTG GGCTAGCTACAACGA GCAGGGGG | 5908 |
| 1130 | CCUGCACA A CCAAGAGG | 4921 | CCTCTTGG GGCTAGCTACAACGA TGTGCAGG | 5909 |
| 1138 | ACCAAGAG G UGACAGCA | 4922 | TGCTGTCA GGCTAGCTACAACGA CTCTTGGT | 5910 |
| 1141 | AAGAGGUG A CAGCAGAG | 4923 | CTCTGCTG GGCTAGCTACAACGA CACCTCTT | 5911 |
| 1144 | AGGUGACA G CAGAGGAU | 4924 | ATCCTCTG GGCTAGCTACAACGA TGTCACCT | 5912 |
| 1151 | AGCAGAGG A UGGAACAC | 4925 | GTGTTCCA GGCTAGCTACAACGA CCTCTGCT | 5913 |
| 1156 | AGGAUGGA A CACAGCGG | 4926 | CCGCTGTG GGCTAGCTACAACGA TCCATCCT | 5914 |
| 1158 | GAUGGAAC A CAGCGGUG | 4927 | CACCGCTG GGCTAGCTACAACGA GTTCCATC | 5915 |
| 1161 | GGAACACA G CGGUGUGA | 4928 | TCACACCG GGCTAGCTACAACGA TGTGTTCC | 5916 |
| 1164 | ACACAGCG G UGUGAGAA | 4929 | TTCTCACA GGCTAGCTACAACGA CGCTGTGT | 5917 |
| 1166 | ACAGCGGU G UGAGAAGU | 4930 | ACTTCTCA GGCTAGCTACAACGA ACCGCTGT | 5918 |
| 1173 | UGUGAGAA G UGCAGCAA | 4931 | TTGCTGCA GGCTAGCTACAACGA TTCTCACA | 5919 |
| 1175 | UGAGAAGU G CAGCAAGC | 4932 | GCTTGCTG GGCTAGCTACAACGA ACTTCTCA | 5920 |
| 1178 | GAAGUGCA G CAAGCCCU | 4935 | AGGGCTTG GGCTAGCTACAACGA TGCACTTC | 5921 |
| 1182 | UGCAGCAA G CCCUGUGC | 4934 | GCACAGGG GGCTAGCTACAACGA TTGCTGCA | 5922 |
| 1187 | CAAGCCCU G UGCCCGAG | 4935 | CTCGGGCA GGCTAGCTACAACGA AGGGCTTG | 5923 |
| 1189 | AGCCCUGU G CCCGAGUG | 4936 | CACTCGGG GGCTAGCTACAACGA ACAGGGCT | 5924 |
| 1195 | GUGCCCGA G UGUGCUAU | 4937 | ATAGCACA GGCTAGCTACAACGA TCGGGCAC | 5925 |
| 1197 | GCCCGAGU G UGCUAUGG | 4938 | CCATAGCA GGCTAGCTACAACGA ACTCGGGC | 5926 |
| 1199 | CCGAGUGU G CUAUGGUC | 4939 | GACCATAG GGCTAGCTACAACGA ACACTCGG | 5927 |
| 1202 | AGUGUGCU A UGGUCUGG | 4940 | CCAGACCA GGCTAGCTACAACGA AGCACACT | 5928 |
| 1205 | GUGCUAUG G UCUGGGCA | 4941 | TGCCCAGA GGCTAGCTACAACGA CATAGCAC | 5929 |
| 1211 | UGGUCUGG G CAUGGAGC | 4942 | GCTCCATG GGCTAGCTACAACGA CCAGACCA | 5930 |
| 1213 | GUCUGGGC A UGGAGCAC | 4943 | GTGCTCCA GGCTAGCTACAACGA GCCCAGAC | 5931 |
| 1218 | GGCAUGGA G CACUUGCG | 4944 | CGCAAGTG GGCTAGCTACAACGA TCCATGCC | 5932 |
| 1220 | CAUGGAGC A CUUGCGAG | 4945 | CTCGCAAG GGCTAGCTACAACGA GCTCCATG | 5933 |
| 1224 | GAGCACUU G CGAGAGGU | 4946 | ACCTCTCG GGCTAGCTACAACGA AAGTGCTC | 5934 |
| 1231 | UGCGAGAG G UGAGGGCA | 4947 | TGCCCTCA GGCTAGCTACAACGA CTCTCGCA | 5935 |
| 1237 | AGGUGAGG G CAGUUACC | 4948 | GGTAACTG GGCTAGCTACAACGA CCTCACCT | 5936 |
| 1240 | UGAGGGCA G UUACCAGU | 4949 | ACTGGTAA GGCTAGCTACAACGA TGCCCTCA | 5937 |
| 1243 | GGGCAGUU A CCAGUGCC | 4950 | GGCACTGG GGCTAGCTACAACGA AACTGCCC | 5938 |
| 1247 | AGUUACCA G UGCCAAUA | 4951 | TATTGGCA GGCTAGCTACAACGA TGGTAACT | 5939 |
| 1249 | UUACCAGU G CCAAUAUC | 4952 | GATATTGG GGCTAGCTACAACGA ACTGGTAA | 5940 |
| 1253 | CAGUGCCA A UAUCCAGG | 4953 | CCTGGATA GGCTAGCTACAACGA TGGCACTG | 5941 |
| 1255 | GUGCCAAU A UCCAGGAG | 4954 | CTCCTGGA GGCTAGCTACAACGA ATTGGCAC | 5942 |
| 1263 | AUCCAGGA G UUUGCUGG | 4955 | CCAGCAAA GGCTAGCTACAACGA TCCTGGAT | 5943 |
| 1267 | AGGAGUUU G CUGGCUGC | 4956 | GCAGCCAG GGCTAGCTACAACGA AAACTCCT | 5944 |
| 1271 | GUUUGCUG G CUGCAAGA | 4957 | TCTTGCAG GGCTAGCTACAACGA CAGCAAAC | 5945 |
| 1274 | UGCUGGCU G CAAGAAGA | 4958 | TCTTCTTG GGCTAGCTACAACGA AGCCAGCA | 5946 |
| 1282 | GCAAGAAG A UCUUUGGG | 4959 | CCCAAAGA GGCTAGCTACAACGA CTTCTTGC | 5947 |
| 1292 | CUUUGGGA G CCUGGCAU | 4960 | ATGCCAGG GGCTAGCTACAACGA TCCCAAAG | 5948 |
| 1297 | GGAGCCUG G CAUUUCUG | 4961 | CAGAAATG GGCTAGCTACAACGA CAGGCTCC | 5949 |
| 1299 | AGCCUGGC A UUUCUGCC | 4962 | GGCAGAAA GGCTAGCTACAACGA GCCAGGCT | 5950 |
| 1305 | GCAUUUCU G CCGGAGAG | 4963 | CTCTCCGG GGCTAGCTACAACGA AGAAATGC | 5951 |
| 1313 | GCCGGAGA G CUUUGAUG | 4964 | CATCAAAG GGCTAGCTACAACGA TCTCCGGC | 5952 |
| 1319 | GAGCUUUG A UGGGGACC | 4965 | GGTCCCCA GGCTAGCTACAACGA CAAAGCTC | 5953 |
| 1325 | UGAUGGGG A CCCAGCCU | 4966 | AGGCTGGG GGCTAGCTACAACGA CCCCATCA | 5954 |
| 1330 | GGGACCCA G CCUCCAAC | 4967 | GTTGGAGG GGCTAGCTACAACGA TGGGTCCC | 5955 |
| 1337 | AGCCUCCA A CACUGCCC | 4968 | GGGCAGTG GGCTAGCTACAACGA TGGAGGCT | 5956 |
| 1339 | CCUCCAAC A CUGCCCCG | 4969 | CGGGGCAG GGCTAGCTACAACGA GTTGGAGG | 5957 |
| 1342 | CCAACACU G CCCCGCUC | 4970 | GAGCGGGG GGCTAGCTACAACGA AGTGTTGG | 5958 |
| 1347 | ACUGCCCC G CUCCAGCC | 4971 | GGCTGGAG GGCTAGCTACAACGA GGGGCAGT | 5959 |
| 1353 | CCGCUCCA G CCAGAGCA | 4972 | TGCTCTGG GGCTAGCTACAACGA TGGAGCGG | 5960 |
| 1359 | CAGCCAGA G CAGCUCCA | 4973 | TGGAGCTG GGCTAGCTACAACGA TCTGGCTG | 5961 |
| 1362 | CCAGAGCA G CUCCAAGU | 4974 | ACTTGGAG GGCTAGCTACAACGA TGCTCTGG | 5962 |
| 1369 | AGCUCCAA G UGUUUGAG | 4975 | CTCAAACA GGCTAGCTACAACGA TTGGAGCT | 5963 |
| 1371 | CUCCAAGU G UUUGAGAC | 4976 | GTCTCAAA GGCTAGCTACAACGA ACTTGGAG | 5964 |
| 1378 | UGUUUGAG A CUCUGGAA | 4977 | TTCCAGAG GGCTAGCTACAACGA CTCAAACA | 5965 |
| 1390 | UGGAAGAG A UCACAGGU | 4978 | ACCTGTGA GGCTAGCTACAACGA CTCTTCCA | 5966 |
| 1393 | AAGAGAUC A CAGGUUAC | 4979 | GTAACCTG GGCTAGCTACAACGA GATCTCTT | 5967 |
| 1397 | GAUCACAG G UUACCUAU | 4980 | ATAGGTAA GGCTAGCTACAACGA CTGTGATC | 5968 |
| 1400 | CACAGGUU A CCUAUACA | 4981 | TGTATAGG GGCTAGCTACAACGA AACCTGTG | 5969 |
| 1404 | GGUUACCU A UACAUCUC | 4982 | GAGATGTA GGCTAGCTACAACGA AGGTAACC | 5970 |
| 1406 | UUACCUAU A CAUCUCAG | 4983 | CTGAGATG GGCTAGCTACAACGA ATAGGTAA | 5971 |
| 1408 | ACCUAUAC A UCUCAGCA | 4984 | TGCTGAGA GGCTAGCTACAACGA GTATAGGT | 5972 |
| 1414 | ACAUCUCA G CAUGGCCG | 4985 | CGGCCATG GGCTAGCTACAACGA TGAGATGT | 5973 |
| 1416 | AUCUCAGC A UGGCCGGA | 4986 | TCCGGCCA GGCTAGCTACAACGA GCTGAGAT | 5974 |
| 1419 | UCAGCAUG G CCGGACAG | 4987 | CTGTCCGG GGCTAGCTACAACGA CATGCTGA | 5975 |
| 1424 | AUGGCCGG A CAGCCUGC | 4988 | GCAGGCTG GGCTAGCTACAACGA CCGGCCAT | 5976 |
| 1427 | GCCGGACA G CCUGCCUG | 4989 | CAGGCAGG GGCTAGCTACAACGA TGTCCGGC | 5977 |
| 1431 | GACAGCCU G CCUGACCU | 4990 | AGGTCAGG GGCTAGCTACAACGA AGGCTGTC | 5978 |
| 1436 | CCUGCCUG A CCUCAGCG | 4991 | CGCTGAGG GGCTAGCTACAACGA CAGGCAGG | 5979 |
| 1442 | UGACCUCA G CGUCUUCC | 4992 | GGAAGACG GGCTAGCTACAACGA TGAGGTCA | 5980 |
| 1444 | ACCUCAGC G UCUUCCAG | 4993 | CTGGAAGA GGCTAGCTACAACGA GCTGAGGT | 5981 |
| 1454 | CUUCCAGA A CCUGCAAG | 4994 | CTTGCAGG GGCTAGCTACAACGA TCTGGAAG | 5982 |
| 1458 | CAGAACCU G CAAGUAAU | 4995 | ATTACTTG GGCTAGCTACAACGA AGGTTCTG | 5983 |
| 1462 | ACCUGCAA G UAAUCCGG | 4996 | CCGGATTA GGCTAGCTACAACGA TTGCAGGT | 5984 |
| 1465 | UGCAAGUA A UCCGGGGA | 4997 | TCCCCGGA GGCTAGCTACAACGA TACTTGCA | 5985 |
| 1473 | AUCCGGGG A CGAAUUCU | 4998 | AGAATTCG GGCTAGCTACAACGA CCCCGGAT | 5986 |
| 1477 | GGGGACGA A UUCUGCAC | 4999 | GTGCAGAA GGCTAGCTACAACGA TCGTCCCC | 5987 |
| 1482 | CGAAUUCU G CACAAUGG | 5000 | CCATTGTG GGCTAGCTACAACGA AGAATTCG | 5988 |
| 1484 | AAUUCUGC A CAAUGGCG | 5001 | CGCCATTG GGCTAGCTACAACGA GCAGAATT | 5989 |
| 1487 | UCUGCACA A UGGCGCCU | 5002 | AGGCGCCA GGCTAGCTACAACGA TGTGCAGA | 5990 |
| 1490 | GCACAAUG G CGCCUACU | 5003 | AGTAGGCG GGCTAGCTACAACGA CATTGTGC | 5991 |
| 1492 | ACAAUGGC G CCUACUCG | 5004 | CGAGTAGG GGCTAGCTACAACGA GCCATTGT | 5992 |
| 1496 | UGGCGCCU A CUCGCUGA | 5005 | TCAGCGAG GGCTAGCTACAACGA AGGCGCCA | 5993 |
| 1500 | GCCUACUC G CUGACCCU | 5006 | AGGGTCAG GGCTAGCTACAACGA GAGTAGGC | 5994 |
| 1504 | ACUCGCUG A CCCUGCAA | 5007 | TTGCAGGG GGCTAGCTACAACGA CAGCGAGT | 5995 |
| 1509 | CUGACCCU G CAAGGGCU | 5008 | AGCCCTTG GGCTAGCTACAACGA AGGGTCAG | 5996 |
| 1515 | CUGCAAGG G CUGGGCAU | 5009 | ATGCCCAG GGCTAGCTACAACGA CCTTGCAG | 5997 |
| 1520 | AGGGCUGG G CAUCAGCU | 5010 | AGCTGATG GGCTAGCTACAACGA CCAGCCCT | 5998 |
| 1522 | GGCUGGGC A UCAGCUGG | 5011 | CCAGCTGA GGCTAGCTACAACGA GCCCAGCC | 5999 |
| 1526 | GGGCAUCA G CUGGCUGG | 5012 | CCAGCCAG GGCTAGCTACAACGA TGATGCCC | 6000 |
| 1530 | AUCAGCUG G CUGGGGCU | 5013 | AGCCCCAG GGCTAGCTACAACGA CAGCTGAT | 6001 |
| 1536 | UGGCUGGG G CUGCGCUC | 5014 | GAGCGCAG GGCTAGCTACAACGA CCCAGCCA | 6002 |
| 1539 | CUGGGGCU G CGCUCACU | 5015 | AGTGAGCG GGCTAGCTACAACGA AGCCCCAG | 6003 |
| 1541 | GGGGCUGC G CUCACUGA | 5016 | TCAGTGAG GGCTAGCTACAACGA GCAGCCCC | 6004 |
| 1545 | CUGCGCUC A CUGAGGGA | 5017 | TCCCTCAG GGCTAGCTACAACGA GAGCGCAG | 6005 |
| 1554 | CUGAGGGA A CUGGGCAG | 5018 | CTGCCCAG GGCTAGCTACAACGA TCCCTCAG | 6006 |
| 1559 | GGAACUGG G CAGUGGAC | 5019 | GTCCACTG GGCTAGCTACAACGA CCAGTTCC | 6007 |
| 1562 | ACUGGGCA G UGGACUGG | 5020 | CCAGTCCA GGCTAGCTACAACGA TGCCCAGT | 6008 |
| 1566 | GGCAGUGG A CUGGCCCU | 5021 | AGGGCCAG GGCTAGCTACAACGA CCACTGCC | 6009 |
| 1570 | GUGGACUG G CCCUCAUC | 5022 | GATGAGGG GGCTAGCTACAACGA CAGTCCAC | 6010 |
| 1576 | UGGCCCUC A UCCACCAU | 5023 | ATGGTGGA GGCTAGCTACAACGA GAGGGCCA | 6011 |
| 1580 | CCUCAUCC A CCAUAACA | 5024 | TGTTATGG GGCTAGCTACAACGA GGATGAGG | 6012 |
| 1583 | CAUCCACC A UAACACCC | 5025 | GGGTGTTA GGCTAGCTACAACGA GGTGGATG | 6013 |
| 1586 | CCACCAUA A CACCCACC | 5026 | GGTGGGTG GGCTAGCTACAACGA TATGGTGG | 6014 |
| 1588 | ACCAUAAC A CCCACCUC | 5027 | GAGGTGGG GGCTAGCTACAACGA GTTATGGT | 6015 |
| 1592 | UAACACCC A CCUCUGCU | 5028 | AGCAGAGG GGCTAGCTACAACGA GGGTGTTA | 6016 |
| 1598 | CCACCUCU G CUUCGUGC | 5029 | GCACGAAG GGCTAGCTACAACGA AGAGGTGG | 6017 |
| 1603 | UCUGCUUC G UGCACACG | 5030 | CGTGTGCA GGCTAGCTACAACGA GAAGCAGA | 6018 |
| 1605 | UGCUUCGU G CACACGGU | 5031 | ACCGTGTG GGCTAGCTACAACGA ACGAAGCA | 6019 |
| 1607 | CUUCGUGC A CACGGUGC | 5032 | GCACCGTG GGCTAGCTACAACGA GCACGAAG | 6020 |
| 1609 | UCGUGCAC A CGGUGCCC | 5033 | GGGCACCG GGCTAGCTACAACGA GTGCACGA | 6021 |
| 1612 | UGCACACG G UGCCCUGG | 5034 | CCAGGGCA GGCTAGCTACAACGA CGTGTGCA | 6022 |
| 1614 | CACACGGU G CCCUGGGA | 5035 | TCCCAGGG GGCTAGCTACAACGA ACCGTGTG | 6023 |
| 1622 | GCCCUGGG A CCAGCUCU | 5036 | AGAGCTGG GGCTAGCTACAACGA CCCAGGGC | 6024 |
| 1626 | UGGGACCA G CUCUUUCG | 5037 | CGAAAGAG GGCTAGCTACAACGA TGGTCCCA | 6025 |
| 1637 | CUUUCGGA A CCCGCACC | 5038 | GGTGCGGG GGCTAGCTACAACGA TCCGAAAG | 6026 |
| 1641 | CGGAACCC G CACCAAGC | 5039 | GCTTGGTG GGCTAGCTACAACGA GGGTTCCG | 6027 |
| 1643 | GAACCCGC A CCAAGCUC | 5040 | GAGCTTGG GGCTAGCTACAACGA GCGGGTTC | 6028 |
| 1648 | CGCACCAA G CUCUGCUC | 5041 | GAGCAGAG GGCTAGCTACAACGA TTGGTGCG | 6029 |
| 1653 | CAAGCUCU G CUCCACAC | 5042 | GTGTGGAG GGCTAGCTACAACGA AGAGCTTG | 6030 |
| 1658 | UCUGCUCC A CACUGCCA | 5043 | TGGCAGTG GGCTAGCTACAACGA GGAGCAGA | 6031 |
| 1660 | UGCUCCAC A CUGCCAAC | 5044 | GTTGGCAG GGCTAGCTACAACGA GTGGAGCA | 6032 |
| 1663 | UCCACACU G CCAACCGG | 5045 | CCGGTTGG GGCTAGCTACAACGA AGTGTGGA | 6033 |
| 1667 | CACUGCCA A CCGGCCAG | 5046 | CTGGCCGG GGCTAGCTACAACGA TGGCAGTG | 6034 |
| 1671 | GCCAACCG G CCAGAGGA | 5047 | TCCTCTGG GGCTAGCTACAACGA CGGTTGGC | 6035 |
| 1679 | GCCAGAGG A CGAGUGUG | 5048 | CACACTCG GGCTAGCTACAACGA CCTCTGGC | 6036 |
| 1683 | GAGGACGA G UGUGUGGG | 5049 | CCCACACA GGCTAGCTACAACGA TCGTCCTC | 6037 |
| 1685 | GGACGAGU G UGUGGGCG | 5050 | CGCCCACA GGCTAGCTACAACGA ACTCGTCC | 6038 |
| 1687 | ACGAGUGU G UGGGCGAG | 5051 | CTCGCCCA GGCTAGCTACAACGA ACACTCGT | 6039 |
| 1691 | GUGUGUGG G CGAGGGCC | 5052 | GGCCCTCG GGCTAGCTACAACGA CCACACAC | 6040 |
| 1697 | GGGCGAGG G CCUGGCCU | 5053 | AGGCCAGG GGCTAGCTACAACGA CCTCGCCC | 6041 |
| 1702 | AGGGCCUG G CCUGCCAC | 5054 | GTGGCAGG GGCTAGCTACAACGA CAGGCCCT | 6042 |
| 1706 | CCUGGCCU G CCACCAGC | 5055 | GCTGGTGG GGCTAGCTACAACGA AGGCCAGG | 6043 |
| 1709 | GGCCUGCC A CCAGCUGU | 5056 | ACAGCTGG GGCTAGCTACAACGA GGCAGGCC | 6044 |
| 1713 | UGCCACCA G CUGUGCGC | 5057 | GCGCACAG GGCTAGCTACAACGA TGGTGGCA | 6045 |
| 1716 | CACCAGCU G UGCGCCCG | 5058 | CGGGCGCA GGCTAGCTACAACGA AGCTGGTC | 6046 |
| 1718 | CCACCUGU G CGCCCGAG | 5059 | CTCGGGCG GGCTAGCTACAACGA ACAGCTGG | 6047 |
| 1720 | AGCUGUGC G CCCGAGGG | 5060 | CCCTCGGG GGCTAGCTACAACGA GCACACCT | 6048 |
| 1728 | GCCCGAGG G CACUCCUG | 5061 | CAGCAGTG GGCTAGCTACAACGA CCTCGGGC | 6049 |
| 1730 | CCGAGGGC A CUGCUGGG | 5062 | CCCACCAG GGCTAGCTACAACGA GCCCTCGG | 6050 |
| 1733 | AGGGCACU G CUGGGCUC | 5063 | GACCCCAG GGCTAGCTACAACGA AGTGCCCT | 6051 |
| 1739 | CUGCUGGG G UCCAGGGC | 5064 | GCCCTGGA GGCTAGCTACAACGA CCCAGCAG | 6052 |
| 1746 | GGUCCAGG G CCCACCCA | 5065 | TGCGTGGG GGCTAGCTACAACGA CCTCGACC | 6053 |
| 1750 | CAGGGCCC A CCCAGUGU | 5066 | ACACTGGG GGCTAGCTACAACGA GGCCCCTG | 6054 |
| 1755 | CCCACCCA G UGUGUCAA | 5067 | TTGACACA GGCTAGCTACAACGA TGGGTGGG | 6055 |
| 1757 | CACCCAGU G UGUCAACU | 5068 | AGTTGACA GGCTAGCTACAACGA ACTGGGTC | 6056 |
| 1759 | CCCAGUGU G UCAACUGC | 5069 | GCAGTTGA GGCTAGCTACAACGA ACACTGGG | 6057 |
| 1763 | GUGUGUCA A CUGCAGCC | 5070 | GGCTGCAG GGCTAGCTACAACGA TGACACAC | 6058 |
| 1766 | UGUCAACU G CAGCCAGU | 5071 | ACTGGCTG GGCTAGCTACAACGA AGTTGACA | 6059 |
| 1769 | CAACUGCA G CCAGUUCC | 5072 | GGAACTGC GGCTAGCTACAACGA TGCAGTTG | 6060 |
| 1773 | UGCAGCCA G UUCCUUCG | 5073 | CGAACCAA GGCTAGCTACAACGA TGCCTGCA | 6061 |
| 1784 | CCUUCGGG G CCAGGAGU | 5074 | ACTCCTGC GGCTAGCTACAACGA CCCGAAGG | 6062 |
| 1791 | GGCCAGGA G UGCGUGGA | 5075 | TCCACGCA GGCTAGCTACAACGA TCCTGGCC | 6063 |
| 1793 | CCAGGAGU G CGUGGAGG | 5076 | CCTCCACG GGCTAGCTACAACGA ACTCCTGG | 6064 |
| 1795 | AGGAGUGC G UGGAGGAA | 5077 | TTCCTCCA GGCTAGCTACAACGA GCACTCCT | 6065 |
| 1803 | GUGGAGGA A UGCCGAGU | 5078 | ACTCGGCA GGCTAGCTACAACGA TCCTCCAC | 6066 |
| 1805 | GGAGGAAU G CCGAGUAC | 5079 | GTACTCGG GGCTAGCTACAACGA ATTCCTCC | 6067 |
| 1810 | AAUGCCGA G UACUGCAG | 5080 | CTGCAGTA GGCTAGCTACAACGA TCGGCATT | 6068 |
| 1812 | UGCCGAGU A CUGCAGGG | 5081 | CCCTGCAG GGCTAGCTACAACGA ACTCGGCA | 6069 |
| 1815 | CGAGUACU G CAGGGGCU | 5082 | AGCCCCTG GGCTAGCTACAACGA AGTACTCG | 6070 |
| 1821 | CUGCAGGG G CUCCCCAG | 5083 | CTGGGGAG GGCTAGCTACAACGA CCCTGCAG | 6071 |
| 1833 | CCCAGGGA G UAUGUGAA | 5084 | TTCACATA GGCTAGCTACAACGA TCCCTGGG | 6072 |
| 1835 | CAGGGAGU A UGUGAAUG | 5085 | CATTCACA GGCTAGCTACAACGA ACTCCCTG | 6073 |
| 1837 | GGGAGUAU G UGAAUGCC | 5086 | GGCATTCA GGCTAGCTACAACGA ATACTCCC | 6074 |
| 1841 | GUAUGUGA A UGCCAGGC | 5087 | GCCTGGCA GGCTAGCTACAACGA TCACATAC | 6075 |
| 1843 | AUGUGAAU G CCAGGCAC | 5088 | GTGCCTGG GGCTAGCTACAACGA ATTCACAT | 6076 |
| 1848 | AAUGCCAG G CACUGUUU | 5089 | AAACAGTG GGCTAGCTACAACGA CTGGCATT | 6077 |
| 1850 | UGCCAGGC A CUGUUUGC | 5090 | GCAAACAG GGCTAGCTACAACGA GCCTGGCA | 6078 |
| 1853 | CAGGCACU G UUUGCCGU | 5091 | ACGGCAAA GGCTAGCTACAACGA AGTGCCTG | 6079 |
| 1857 | CACUGUUU G CCGUGCCA | 5092 | TGGCACGG GGCTAGCTACAACGA AAACAGTG | 6080 |
| 1860 | UGUUUGCC G UGCCACCC | 5093 | GGGTGGCA GGCTAGCTACAACGA GGCAAACA | 6081 |
| 1862 | UUUGCCGU G CCACCCUG | 5094 | CAGGGTGG GGCTAGCTACAACGA ACGGCAAA | 6082 |
| 1865 | GCCGUGCC A CCCUGAGU | 5095 | ACTCAGGG GGCTAGCTACAACGA GGCACGGC | 6083 |
| 1872 | CACCCUGA G UGUCAGCC | 5096 | GGCTGACA GGCTAGCTACAACGA TCAGGGTG | 6084 |
| 1874 | CCCUGAGU G UCAGCCCC | 5097 | GGGGCTGA GGCTAGCTACAACGA ACTCAGGG | 6085 |
| 1878 | GAGUGUCA G CCCCAGAA | 5098 | TTCTGGGG GGCTAGCTACAACGA TGACACTC | 6086 |
| 1886 | GCCCCAGA A UGGCUCAG | 5099 | CTGAGCCA GGCTAGCTACAACGA TCTGGGGC | 6087 |
| 1889 | CCAGAAUG G CUCAGUGA | 5100 | TCACTGAG GGCTAGCTACAACGA CATTCTGG | 6088 |
| 1894 | AUGGCUCA G UGACCUGU | 5101 | ACAGGTCA GGCTAGCTACAACGA TGAGCCAT | 6089 |
| 1897 | GCUCAGUG A CCUGUUUU | 5102 | AAAACAGG GGCTAGCTACAACGA CACTGAGC | 6090 |
| 1901 | AGUGACCU G UUUUGGAC | 5103 | GTCCAAAA GGCTAGCTACAACGA AGGTCACT | 6091 |
| 1908 | UGUUUUGG A CCGGAGGC | 5104 | GCCTCCGG GGCTAGCTACAACGA CCAAAACA | 6092 |
| 1915 | GACCGGAG G CUGACCAG | 5105 | CTGGTCAG GGCTAGCTACAACGA CTCCGGTC | 6093 |
| 1919 | GGAGGCUG A CCAGUGUG | 5106 | CACACTGG GGCTAGCTACAACGA CAGCCTCC | 6094 |
| 1923 | GCUGACCA G UGUGUGGC | 5107 | GCCACACA GGCTAGCTACAACGA TGGTCAGC | 6095 |
| 1925 | UGACCAGU G UGUGGCCU | 5108 | AGGCCACA GGCTAGCTACAACGA ACTGGTCA | 6096 |
| 1927 | ACCAGUGU G UGGCCUGU | 5109 | ACAGGCCA GGCTAGCTACAACGA ACACTGGT | 6097 |
| 1930 | AGUGUGUG G CCUGUGCC | 5110 | GGCACAGG GGCTAGCTACAACGA CACACACT | 6098 |
| 1934 | UGUGGCCU G UGCCCACU | 5111 | AGTGGGCA GGCTAGCTACAACGA AGGCCACA | 6099 |
| 1936 | UGGCCUGU G CCCACUAU | 5112 | ATAGTGGG GGCTAGCTACAACGA ACAGGCCA | 6100 |
| 1940 | CUGUGCCC A CUAUAAGG | 5113 | CCTTATAG GGCTAGCTACAACGA GGGCACAG | 6101 |
| 1943 | UGCCCACU A UAAGGACC | 5114 | GGTCCTTA GGCTAGCTACAACGA AGTGGGCA | 6102 |
| 1949 | CUAUAAGG A CCCUCCCU | 5115 | AGGGAGGG GGCTAGCTACAACGA CCTTATAG | 6103 |
| 1961 | UCCCUUCU G CGUGGCCC | 5116 | GGGCCACG GGCTAGCTACAACGA AGAAGGGA | 6104 |
| 1963 | CCUUCUGC G UGGCCCGC | 5117 | GCGGGCCA GGCTAGCTACAACGA GCAGAAGG | 6105 |
| 1966 | UCUGCGUG G CCCGCUGC | 5118 | GCAGCGGG GGCTAGCTACAACGA CACGCAGA | 6106 |
| 1970 | CGUGGCCC G CUGCCCCA | 5119 | TGGGGCAG GGCTAGCTACAACGA GGGCCACG | 6107 |
| 1973 | GGCCCGCU G CCCCAGCG | 5120 | CGCTGGGG GGCTAGCTACAACGA AGCGGGCC | 6108 |
| 1979 | CUGCCCCA G CGGUGUGA | 5121 | TCACACCG GGCTAGCTACAACGA TGGGGCAG | 6109 |
| 1982 | CCCCAGCG G UGUGAAAC | 5122 | GTTTCACA GGCTAGCTACAACGA CGCTGGGG | 6110 |
| 1984 | CCAGCGGU G UGAAACCU | 5123 | AGGTTTCA GGCTAGCTACAACGA ACCGCTGG | 6111 |
| 1989 | GGUGUGAA A CCUGACCU | 5124 | AGGTCAGG GGCTAGCTACAACGA TTCACACC | 6112 |
| 1994 | GAAACCUG A CCUCUCCU | 5125 | AGGAGAGG GGCTAGCTACAACGA CAGGTTTC | 6113 |
| 2003 | CCUCUCCU A CAUGCCCA | 5126 | TGGGCATG GGCTAGCTACAACGA AGGAGAGG | 6114 |
| 2005 | UCUCCUAC A UGCCCAUC | 5127 | GATGGGCA GGCTAGCTACAACGA GTAGGAGA | 6115 |
| 2007 | UCCUACAU G CCCAUCUG | 5128 | CAGATGGG GGCTAGCTACAACGA ATGTAGGA | 6116 |
| 2011 | ACAUGCCC A UCUGGAAG | 5129 | CTTCCAGA GGCTAGCTACAACGA GGGCATGT | 6117 |
| 2019 | AUCUGGAA G UUUCCAGA | 5130 | TCTGGAAA GGCTAGCTACAACGA TTCCAGAT | 6118 |
| 2027 | GUUUCCAG A UGAGGAGG | 5131 | CCTCCTCA GGCTAGCTACAACGA CTGGAAAC | 6119 |
| 2036 | UGAGGAGG G CGCAUGCC | 5132 | GGCATGCG GGCTAGCTACAACGA CCTCCTCA | 6120 |
| 2038 | AGGAGGGC G CAUGCCAG | 5133 | CTGGCATG GGCTAGCTACAACGA GCCCTCCT | 6121 |
| 2040 | GAGGGCGC A UGCCAGCC | 5134 | GGCTGGCA GGCTAGCTACAACGA GCGCCCTC | 6122 |
| 2042 | GGGCGCAU G CCAGCCUU | 5135 | AAGGCTGG GGCTAGCTACAACGA ATGCGCCC | 6123 |
| 2046 | GCAUGCCA G CCUUGCCC | 5136 | GGGCAAGG GGCTAGCTACAACGA TGGCATGC | 6124 |
| 2051 | CCAGCCUU G CCCCAUCA | 5137 | TGATGGGG GGCTAGCTACAACGA AAGGCTGG | 6125 |
| 2056 | CUUGCCCC A UCAACUGC | 5138 | GCAGTTGA GGCTAGCTACAACGA GGGGCAAG | 6126 |
| 2060 | CCCCAUCA A CUGCACCC | 5139 | GGGTGCAG GGCTAGCTACAACGA TGATGGGG | 6127 |
| 2063 | CAUCAACU G CACCCACU | 5140 | AGTGGGTG GGCTAGCTACAACGA AGTTGATG | 6128 |
| 2065 | UCAACUGC A CCCACUCC | 5141 | GGAGTGGG GGCTAGCTACAACGA GCAGTTGA | 6129 |
| 2069 | CUGCACCC A CUCCUGUG | 5142 | CACAGGAG GGCTAGCTACAACGA GGGTGCAG | 6130 |
| 2075 | CCACUCCU G UGUGGACC | 5143 | GGTCCACA GGCTAGCTACAACGA AGGAGTGG | 6131 |
| 2077 | ACUCCUGU G UGGACCUG | 5144 | CAGGTCCA GGCTAGCTACAACGA ACAGGAGT | 6132 |
| 2081 | CUGUGUGG A CCUGGAUG | 5145 | CATCCAGG GGCTAGCTACAACGA CCACACAG | 6133 |
| 2087 | GGACCUGG A UGACAAGG | 5146 | CCTTGTCA GGCTAGCTACAACGA CCAGGTCC | 6134 |
| 2090 | CCUGGAUG A CAAGGGCU | 5147 | AGCCCTTG GGCTAGCTACAACGA CATCCAGG | 6135 |
| 2096 | UGACAAGG G CUGCCCCG | 5148 | CGGGGCAG GGCTAGCTACAACGA CCTTGTCA | 6136 |
| 2099 | CAAGGGCU G CCCCGCCG | 5149 | CGGCGGGG GGCTAGCTACAACGA AGCCCTTG | 6137 |
| 2104 | GCUGCCCC G CCGAGCAG | 5150 | CTGCTCGG GGCTAGCTACAACGA GGGGCAGC | 6138 |
| 2109 | CCCGCCGA G CAGAGAGC | 5151 | GCTCTCTG GGCTAGCTACAACGA TCGGCGGG | 6139 |
| 2116 | AGCAGAGA G CCAGCCCU | 5152 | AGGGCTGG GGCTAGCTACAACGA TCTCTGCT | 6140 |
| 2120 | GAGAGCCA G CCCUCUGA | 5153 | TCAGAGGG GGCTAGCTACAACGA TGGCTCTC | 6141 |
| 2128 | GCCCUCUG A CGUCCAUC | 5154 | GATGGACG GGCTAGCTACAACGA CAGAGGGC | 6142 |
| 2130 | CCUCUGAC G UCCAUCAU | 5155 | ATGATGGA GGCTAGCTACAACGA GTCAGAGG | 6143 |
| 2134 | UGACGUCC A UCAUCUCU | 5156 | AGAGATGA GGCTAGCTACAACGA GGACGTCA | 6144 |
| 2137 | CGUCCAUC A UCUCUGCG | 5157 | CGCAGAGA GGCTAGCTACAACGA GATGGACG | 6145 |
| 2143 | UCAUCUCU G CGGUGGUU | 5158 | AACCACCG GGCTAGCTACAACGA AGAGATGA | 6146 |
| 2146 | UCUCUGCG G UGGUUGGC | 5159 | GCCAACCA GGCTAGCTACAACGA CGCAGAGA | 6147 |
| 2149 | CUGCGGUG G UUGGCAUU | 5160 | AATGCCAA GGCTAGCTACAACGA CACCGCAG | 6148 |
| 2153 | GGUGGUUG G CAUUCUGC | 5161 | GCAGAATG GGCTAGCTACAACGA CAACCACC | 6149 |
| 2155 | UGGUUGGC A UUCUGCUG | 5162 | CAGCAGAA GGCTAGCTACAACGA GCCAACCA | 6150 |
| 2160 | GGCAUUCU G CUGGUCGU | 5163 | ACGACCAG GGCTAGCTACAACGA AGAATGCC | 6151 |
| 2164 | UUCUGCUG G UCGUGGUC | 5164 | GACCACGA GGCTAGCTACAACGA CAGCAGAA | 6152 |
| 2167 | UGCUGGUC G UGGUCUUG | 5165 | CAAGACCA GGCTAGCTACAACGA GACCAGCA | 6153 |
| 2170 | UGGUCGUG G UCUUGGGG | 5166 | CCCCAAGA GGCTAGCTACAACGA CACGACCA | 6154 |
| 2179 | UCUUGGGG G UGGUCUUU | 5167 | AAAGACCA GGCTAGCTACAACGA CCCCAAGA | 6155 |
| 2182 | UGGGGGUG G UCUUUGGG | 5168 | CCCAAAGA GGCTAGCTACAACGA CACCCCCA | 6156 |
| 2191 | UCUUUGGG A UCCUCAUC | 5169 | GATGAGGA GGCTAGCTACAACGA CCCAAAGA | 6157 |
| 2197 | GGAUCCUC A UCAAGCGA | 5170 | TCGCTTGA GGCTAGCTACAACGA GAGGATCC | 6158 |
| 2202 | CUCAUCAA G CGACGGCA | 5171 | TGCCGTCG GGCTAGCTACAACGA TTGATGAG | 6159 |
| 2205 | AUCAAGCG A CGGCAGCA | 5172 | TGCTGCCG GGCTAGCTACAACGA CGCTTGAT | 6160 |
| 2208 | AAGCGACG G CAGCAGAA | 5173 | TTCTGCTG GGCTAGCTACAACGA CGTCGCTT | 6161 |
| 2211 | CGACGGCA G CAGAAGAU | 5174 | ATCTTCTG GGCTAGCTACAACGA TGCCGTCG | 6162 |
| 2218 | AGCAGAAG A UCCGGAAG | 5175 | CTTCCGGA GGCTAGCTACAACGA CTTCTGCT | 6163 |
| 2226 | AUCCGGAA G UACACGAU | 5176 | ATCGTGTA GGCTAGCTACAACGA TTCCGGAT | 6164 |
| 2228 | CCGGAAGU A CACGAUGC | 5177 | GCATCGTG GGCTAGCTACAACGA ACTTCCGG | 6165 |
| 2230 | GGAAGUAC A CGAUGCGG | 5178 | CCGCATCG GGCTAGCTACAACGA GTACTTCC | 6166 |
| 2233 | AGUACACG A UGCGGAGA | 5179 | TCTCCGCA GGCTAGCTACAACGA CGTGTACT | 6167 |
| 2235 | UACACGAU G CGGAGACU | 5180 | AGTCTCCG GGCTAGCTACAACGA ATCGTGTA | 6168 |
| 2241 | AUGCGGAG A CUGCUGCA | 5181 | TGCAGCAG GGCTAGCTACAACGA CTCCGCAT | 6169 |
| 2244 | CGGAGACU G CUGCAGGA | 5182 | TCCTGCAG GGCTAGCTACAACGA AGTCTCCG | 6170 |
| 2247 | AGACUGCU G CAGGAAAC | 5183 | GTTTCCTG GGCTAGCTACAACGA AGCAGTCT | 6171 |
| 2254 | UGCAGGAA A CGGAGCUGC 5184 | CAGCTCCG GGCTAGCTACAACGA TTCCTGCA | 6172 | |
| 2259 | GAAACGGA G CUGGUGGA | 5185 | TCCACCAG GGCTAGCTACAACGA TCCGTTTC | 6173 |
| 2263 | CGGAGCUG G UGGAGCCG | 5186 | CGGCTCCA GGCTAGCTACAACGA CAGCTCCG | 6174 |
| 2268 | CUGGUGGA G CCGCUGAC | 5187 | GTCAGCGG GGCTAGCTACAACGA TCCACCAG | 6175 |
| 2271 | GUGGAGCC G CUGACACC | 5188 | GGTGTCAG GGCTAGCTACAACGA GGCTCCAC | 6176 |
| 2275 | AGCCGCUG A CACCUAGC | 5189 | GCTAGGTG GGCTAGCTACAACGA CAGCGGCT | 6177 |
| 2277 | CCGCUGAC A CCUAGCGG | 5190 | CCGCTAGG GGCTAGCTACAACGA GTCAGCGG | 6178 |
| 2282 | GACACCUA G CGGAGCGA | 5191 | TCGCTCCG GGCTAGCTACAACGA TAGGTGTC | 6179 |
| 2287 | CUAGCGGA G CGAUGCCC | 5192 | GGGCATCG GGCTAGCTACAACGA TCCGCTAG | 6180 |
| 2290 | GCGGAGCG A UGCCCAAC | 5193 | GTTGGGCA GGCTAGCTACAACGA CGCTCCGC | 6181 |
| 2292 | GGAGCGAU G CCCAACCA | 5194 | TGGTTGGG GGCTAGCTACAACGA ATCGCTCC | 6182 |
| 2297 | GAUGCCCA A CCAGGCGC | 5195 | GCGCCTGG GGCTAGCTACAACGA TGGGCATC | 6183 |
| 2302 | CCAACCAG G CGCAGAUG | 5196 | CATCTGCG GGCTAGCTACAACGA CTGGTTGG | 6184 |
| 2304 | AACCAGGC G CAGAUGCG | 5197 | CGCATCTG GGCTAGCTACAACGA GCCTGGTT | 6185 |
| 2308 | AGGCGCAG A UGCGGAUC | 5198 | GATCCGCA GGCTAGCTACAACGA CTGCGCCT | 6186 |
| 2310 | GCGCAGAU G CGGAUCCU | 5199 | AGGATCCG GGCTAGCTACAACGA ATCTGCGC | 6187 |
| 2314 | AGAUGCGG A UCCUGAAA | 5200 | TTTCAGGA GGCTAGCTACAACGA CCGCATCT | 6188 |
| 2326 | UGAAAGAG A CGGAGCUG | 5201 | CAGCTCCG GGCTAGCTACAACGA CTCTTTCA | 6189 |
| 2331 | GAGACGGA G CUGAGGAA | 5202 | TTCCTCAG GGCTAGCTACAACGA TCCGTCTC | 6190 |
| 2341 | UGAGGAAG G UGAAGGUG | 5203 | CACCTTCA GGCTAGCTACAACGA CTTCCTCA | 6191 |
| 2347 | AGGUGAAG G UGCUUGGA | 5204 | TCCAAGCA GGCTAGCTACAACGA CTTCACCT | 6192 |
| 2349 | GUGAAGGU G CUUGGAUC | 5205 | GATCCAAG GGCTAGCTACAACGA ACCTTCAC | 6193 |
| 2355 | GUGCUUGG A UCUGGCGC | 5206 | GCGCCAGA GGCTAGCTACAACGA CCAAGCAC | 6194 |
| 2360 | UGGAUCUG G CGCUUUUG | 5207 | CAAAAGCG GGCTAGCTACAACGA CAGATCCA | 6195 |
| 2362 | GAUCUGGC G CUUUUGGC | 5208 | GCCAAAAG GGCTAGCTACAACGA GCCAGATC | 6196 |
| 2369 | CGCUUUUG G CACAGUCU | 5209 | AGACTGTG GGCTAGCTACAACGA CAAAAGCG | 6197 |
| 2371 | CUUUUGGC A CAGUCUAC | 5210 | GTAGACTG GGCTAGCTACAACGA GCCAAAAG | 6198 |
| 2374 | UUGGCACA G UCUACAAG | 5211 | CTTGTAGA GGCTAGCTACAACGA TGTGCCAA | 6199 |
| 2378 | CACAGUCU A CAAGGGCA | 5212 | TGCCCTTG GGCTAGCTACAACGA AGACTGTG | 6200 |
| 2384 | CUACAAGG G CAUCUGGA | 5213 | TCCAGATG GGCTAGCTACAACGA CCTTGTAG | 6201 |
| 2386 | ACAAGGGC A UCUGGAUC | 5214 | GATCCAGA GGCTAGCTACAACGA GCCCTTGT | 6202 |
| 2392 | GCAUCUGG A UCCCUGAU | 5215 | ATCAGGGA GGCTAGCTACAACGA CCAGATGC | 6203 |
| 2399 | GAUCCCUG A UGGGGAGA | 5216 | TCTCCCCA GGCTAGCTACAACGA CAGGGATC | 6204 |
| 2408 | UGGGGAGA A UGUGAAAA | 5217 | TTTTCACA GGCTAGCTACAACGA TCTCCCCA | 6205 |
| 2410 | GGGAGAAU G UGAAAAUU | 5218 | AATTTTCA GGCTAGCTACAACGA ATTCTCCC | 6206 |
| 2416 | AUGUGAAA A UUCCAGUG | 5219 | CACTGGAA GGCTAGCTACAACGA TTTCACAT | 6207 |
| 2422 | AAAUUCCA G UGGCCAUC | 5220 | GATGGCCA GGCTAGCTACAACGA TGGAATTT | 6208 |
| 2425 | UUCCAGUG G CCAUCAAA | 5221 | TTTGATGG GGCTAGCTACAACGA CACTGGAA | 6209 |
| 2428 | CAGUGGCC A UCAAAGUG | 5222 | CACTTTGA GGCTAGCTACAACGA GGCCACTG | 6210 |
| 2434 | CCAUCAAA G UGUUGAGG | 5223 | CCTCAACA GGCTAGCTACAACGA TTTGATGG | 6211 |
| 2436 | AUCAAAGU G UUGAGGGA | 5224 | TCCCTCAA GGCTAGCTACAACGA ACTTTGAT | 6212 |
| 2447 | GAGGGAAA A CACAUCCC | 5225 | GGGATGTG GGCTAGCTACAACGA TTTCCCTC | 6213 |
| 2449 | GGGAAAAC A CAUCCCCC | 5226 | GGGGGATG GGCTAGCTACAACGA GTTTTCCC | 6214 |
| 2451 | GAAAACAC A UCCCCCAA | 5227 | TTGGGGGA GGCTAGCTACAACGA GTGTTTTC | 6215 |
| 2461 | CCCCCAAA G CCAACAAA | 5228 | TTTGTTGG GGCTAGCTACAACGA TTTGGGGG | 6216 |
| 2465 | CAAAGCCA A CAAAGAAA | 5229 | TTTCTTTG GGCTAGCTACAACGA TGGCTTTG | 6217 |
| 2473 | ACAAAGAA A UCUUAGAC | 5230 | GTCTAAGA GGCTAGCTACAACGA TTCTTTGT | 6218 |
| 2480 | AAUCUUAG A CGAAGCAU | 5231 | ATGCTTCG GGCTAGCTACAACGA CTAAGATT | 6219 |
| 2485 | UAGACGAA G CAUACGUG | 5232 | CACGTATG GGCTAGCTACAACGA TTCGTCTA | 6220 |
| 2487 | GACGAAGC A UACGUGAU | 5233 | ATCACGTA GGCTAGCTACAACGA GCTTCGTC | 6221 |
| 2489 | CGAAGCAU A CGUGAUGG | 5234 | CCATCACG GGCTAGCTACAACGA ATGCTTCG | 6222 |
| 2491 | AAGCAUAC G UGAUGGCU | 5235 | AGCCATCA GGCTAGCTACAACGA GTATGCTT | 6223 |
| 2494 | CAUACGUG A UGGCUGGU | 5236 | ACCAGCCA GGCTAGCTACAACGA CACGTATG | 6224 |
| 2497 | ACGUGAUG G CUGGUGUG | 5237 | CACACCAG GGCTAGCTACAACGA CATCACGT | 6225 |
| 2501 | GAUGGCUG G UGUGGGCU | 5238 | AGCCCACA GGCTAGCTACAACGA CAGCCATC | 6226 |
| 2503 | UGGCUGGU G UGGGCUCC | 5239 | GGAGCCCA GGCTAGCTACAACGA ACCAGCCA | 6227 |
| 2507 | UGGUGUGG G CUCCCCAU | 5240 | ATGGGGAG GGCTAGCTACAACGA CCACACCA | 6228 |
| 2514 | GGCUCCCC A UAUGUCUC | 5241 | GAGACATA GGCTAGCTACAACGA GGGGAGCC | 6229 |
| 2516 | CUCCCCAU A UGUCUCCC | 5242 | GGGAGACA GGCTAGCTACAACGA ATGGGGAG | 6230 |
| 2518 | CCCCAUAU G UCUCCCGC | 5243 | GCGGGAGA GGCTAGCTACAACGA ATATGGGG | 6231 |
| 2525 | UGUCUCCC G CCUUCUGG | 5244 | CCAGAAGG GGCTAGCTACAACGA GGGAGACA | 6232 |
| 2534 | CCUUCUGG G CAUCUGCC | 5245 | GGCAGATG GGCTAGCTACAACGA CCAGAAGG | 6233 |
| 2536 | UUCUGGGC A UCUOCCUG | 5246 | CAGGCAGA GGCTAGCTACAACGA GCCCAGAA | 6234 |
| 2540 | GGGCAUCU G CCUGACAU | 5247 | ATGTCAGG GGCTAGCTACAACGA AGATGCCC | 6235 |
| 2545 | UCUGCCUG A CAUCCACG | 5248 | CGTGGATG GGCTAGCTACAACGA CAGGCAGA | 6236 |
| 2547 | UGCCUGAC A UCCACGGU | 5249 | ACCGTGGA GGCTAGCTACAACGA GTCAGGCA | 6237 |
| 2551 | UGACAUCC A CGGUGCAG | 5250 | CTGCACCG GGCTAGCTACAACGA GGATGTCA | 6238 |
| 2554 | CAUCCACG G UGCAGCUG | 5251 | CAGCTGCA GGCTAGCTACAACGA CGTGGATG | 6239 |
| 2556 | UCCACGGU G CAGCUGGU | 5252 | ACCAGCTG GGCTAGCTACAACGA ACCGTGGA | 6240 |
| 2559 | ACGGUGCA G CUGGUGAC | 5253 | GTCACCAG GGCTAGCTACAACGA TGCACCGT | 6241 |
| 2563 | UGCAGCUG G UGACACAG | 5254 | CTGTGTCA GGCTAGCTACAACGA CAGCTGCA | 6242 |
| 2566 | AGCUGGUG A CACAGCUU | 5255 | AAGCTGTG GGCTAGCTACAACGA CACCAGCT | 6243 |
| 2568 | CUGGUGAC A CAGCUUAU | 5256 | ATAAGCTG GGCTAGCTACAACGA GTCACCAG | 6244 |
| 2571 | GUGACACA G CUUAUGCC | 5257 | GGCATAAG GGCTAGCTACAACGA TGTGTCAC | 6245 |
| 2575 | CACAGCUU A UGCCCUAU | 5258 | ATAGGGCA GGCTAGCTACAACGA AAGCTGTG | 6246 |
| 2577 | CAGCUUAU G CCCUAUGG | 5259 | CCATAGGG GGCTAGCTACAACGA ATAAGCTG | 6247 |
| 2582 | UAUGCCCU A UGGCUGCC | 5260 | GGCAGCCA GGCTAGCTACAACGA AGGGCATA | 6248 |
| 2585 | GCCCUAUG G CUGCCUCU | 5261 | AGAGGCAG GGCTAGCTACAACGA CATAGGGC | 6249 |
| 2588 | CUAUGGCU G CCUCUUAG | 5262 | CTAAGAGG GGCTAGCTACAACGA AGCCATAG | 6250 |
| 2597 | CCUCUUAG A CCAUGUCC | 5263 | GGACATGG GGCTAGCTACAACGA CTAAGAGG | 6251 |
| 2600 | CUUAGACC A UGUCCGGG | 5264 | CCCGGACA GGCTAGCTACAACGA GGTCTAAG | 6252 |
| 2602 | UAGACCAU G UCCGGGAA | 5265 | TTCCCGGA GGCTAGCTACAACGA ATGGTCTA | 6253 |
| 2612 | CCGGGAAA A CCGCGGAC | 5266 | GTCCGCGG GGCTAGCTACAACGA TTTCCCGG | 6254 |
| 2615 | GGAAAACC G CGGACGCC | 5267 | GGCGTCCG GGCTAGCTACAACGA GGTTTTCC | 6255 |
| 2619 | AACCGCGG A CGCCUGGG | 5268 | CCCAGGCG GGCTAGCTACAACGA CCGCGGTT | 6256 |
| 2621 | CCGCGGAC G CCUGGGCU | 5269 | AGCCCAGG GGCTAGCTACAACGA GTCCGCGG | 6257 |
| 2627 | ACGCCUGG G CUCCCAGG | 5270 | CCTGGGAG GGCTAGCTACAACGA CCAGGCGT | 6258 |
| 2636 | CUCCCAGG A CCUGCUGA | 5271 | TCAGCAGG GGCTAGCTACAACGA CCTGGGAG | 6259 |
| 2640 | CAGGACCU G CUGAACUG | 5272 | CAGTTCAG GGCTAGCTACAACGA AGGTCCTG | 6260 |
| 2645 | CCUGCUGA A CUGGUGUA | 5273 | TACACCAG GGCTAGCTACAACGA TCAGCAGG | 6261 |
| 2649 | CUGAACUG G UGUAUGCA | 5274 | TGCATACA GGCTAGCTACAACGA CAGTTCAG | 6262 |
| 2651 | GAACUGGU G UAUGCAGA | 5275 | TCTGCATA GGCTAGCTACAACGA ACCAGTTC | 6263 |
| 2653 | ACUGGUGU A UGCAGAUU | 5276 | AATCTGCA GGCTAGCTACAACGA ACACCAGT | 6264 |
| 2655 | UGGUGUAU G CAGAUUGC | 5277 | GCAATCTG GGCTAGCTACAACGA ATACACCA | 6265 |
| 2659 | GUAUGCAG A UUGCCAAG | 5278 | CTTGGCAA GGCTAGCTACAACGA CTGCATAC | 6266 |
| 2662 | UGCAGAUU G CCAAGGGG | 5279 | CCCCTTGG GGCTAGCTACAACGA AATCTGCA | 6267 |
| 2671 | CCAAGGGG A UGAGCUAC | 5280 | GTAGCTCA GGCTAGCTACAACGA CCCCTTGG | 6268 |
| 2675 | GGGGAUGA G CUACCUGG | 5281 | CCAGGTAG GGCTAGCTACAACGA TCATCCCC | 6269 |
| 2678 | GAUGAGCU A CCUGGAGG | 5282 | CCTCCAGG GGCTAGCTACAACGA AGCTCATC | 6270 |
| 2687 | CCUGGAGG A UGUGCGGC | 5283 | GCCGCACA GGCTAGCTACAACGA CCTCCAGG | 6271 |
| 2689 | UGGAGGAU G UGCGGCUC | 5284 | GAGCCGCA GGCTAGCTACAACGA ATCCTCCA | 6272 |
| 2691 | GAGGAUGU G CGGCUCGU | 5285 | ACGAGCCG GGCTAGCTACAACGA ACATCCTC | 6273 |
| 2694 | GAUGUGCG G CUCGUACA | 5286 | TGTACGAG GGCTAGCTACAACGA CGCACATC | 6274 |
| 2698 | UGCGGCUC G UACACAGG | 5287 | CCTGTGTA GGCTAGCTACAACGA GAGCCGCA | 6275 |
| 2700 | CGGCUCGU A CACAGGGA | 5288 | TCCCTGTG GGCTAGCTACAACGA ACGAGCCG | 6276 |
| 2702 | GCUCGUAC A CAGGGACU | 5289 | AGTCCCTG GGCTAGCTACAACGA GTACGAGC | 6277 |
| 2708 | ACACAGGG A CUUGGCCG | 5290 | CGGCCAAG GGCTAGCTACAACGA CCCTGTGT | 6278 |
| 2713 | GGGACUUG G CCGCUCGG | 5291 | CCGAGCGG GGCTAGCTACAACGA CAAGTCCC | 6279 |
| 2716 | ACUUGGCC G CUCGGAAC | 5292 | GTTCCGAG GGCTAGCTACAACGA GGCCAAGT | 6280 |
| 2723 | CGCUCGGA A CGUGCUGG | 5293 | CCAGCACG GGCTAGCTACAACGA TCCGAGCG | 6281 |
| 2725 | CUCGGAAC G UGCUGGUC | 5294 | GACCAGCA GGCTAGCTACAACGA GTTCCGAG | 6282 |
| 2727 | CGGAACGU G CUGGUCAA | 5295 | TTGACCAG GGCTAGCTACAACGA ACGTTCCG | 6283 |
| 2731 | ACGUGCUG G UCAAGAGU | 5296 | ACTCTTGA GGCTAGCTACAACGA CAGCACGT | 6284 |
| 2738 | GGUCAAGA G UCCCAACC | 5297 | GGTTGGGA GGCTAGCTACAACGA TCTTGACC | 6285 |
| 2744 | GAGUCCCA A CCAUGUCA | 5298 | TGACATGG GGCTAGCTACAACGA TGGGACTC | 6286 |
| 2747 | UCCCAACC A UGUCAAAA | 5299 | TTTTGACA GGCTAGCTACAACGA GGTTGGGA | 6287 |
| 2749 | CCAACCAU G UCAAAAUU | 5300 | AATTTTGA GGCTAGCTACAACGA ATGGTTGG | 6288 |
| 2755 | AUGUCAAA A UUACAGAC | 5301 | GTCTGTAA GGCTAGCTACAACGA TTTGACAT | 6289 |
| 2758 | UCAAAAUU A CAGACUUC | 5302 | GAAGTCTG GGCTAGCTACAACGA AATTTTGA | 6290 |
| 2762 | AAUUACAG A CUUCGGGC | 5303 | GCCCGAAG GGCTAGCTACAACGA CTGTAATT | 6291 |
| 2769 | GACUUCGG G CUGGCUCG | 5304 | CGAGCCAG GGCTAGCTACAACGA CCGAAGTC | 6292 |
| 2773 | UCGGGCUG G CUCGGCUG | 5305 | CAGCCGAG GGCTAGCTACAACGA CAGCCCGA | 6293 |
| 2778 | CUGGCUCG G CUGCUCGA | 5306 | TCCAGCAG GGCTAGCTACAACGA CGAGCCAG | 6294 |
| 2781 | GCUCGGCU G CUGGACAU | 5307 | ATGTCCAG GGCTAGCTACAACGA AGCCGAGC | 6295 |
| 2786 | GCUGCUGG A CAUUGACG | 5308 | CGTCAATG GGCTAGCTACAACGA CCAGCAGC | 6296 |
| 2788 | UGCUGGAC A UUGACGAG | 5309 | CTCGTCAA GGCTAGCTACAACGA GTCCAGCA | 6297 |
| 2792 | GGACAUUG A CGAGACAG | 5310 | CTGTCTCG GGCTAGCTACAACGA CAATGTCC | 6298 |
| 2797 | UUGACGAG A CAGAGUAC | 5311 | GTACTCTG GGCTAGCTACAACGA CTCGTCAA | 6299 |
| 2802 | GAGACAGA G UACCAUGC | 5312 | GCATGGTA GGCTAGCTACAACGA TCTGTCTC | 6300 |
| 2804 | GACAGAGU A CCAUGCAG | 5313 | CTGCATGG GGCTAGCTACAACGA ACTCTGTC | 6301 |
| 2807 | AGAGUACC A UGCAGAUG | 5314 | CATCTGCA GGCTAGCTACAACGA GGTACTCT | 6302 |
| 2809 | AGUACCAU G CAGAUGGG | 5315 | CCCATCTG GGCTAGCTACAACGA ATGGTACT | 6303 |
| 2813 | CCAUGCAG A UGGGGGCA | 5316 | TGCCCCCA GGCTAGCTACAACGA CTGCATGG | 6304 |
| 2819 | AGAUGGGG G CAAGGUGC | 5317 | GCACCTTG GGCTAGCTACAACGA CCCCATCT | 6305 |
| 2824 | GGGGCAAG G UGCCCAUC | 5318 | GATGGGCA GGCTAGCTACAACGA CTTGCCCC | 6306 |
| 2826 | GGCAAGGU G CCCAUCAA | 5319 | TTGATGGG GGCTAGCTACAACGA ACCTTGCC | 6307 |
| 2830 | AGGUGCCC A UCAAGUGG | 5320 | CCACTTGA GGCTAGCTACAACGA GGGCACCT | 6308 |
| 2835 | CCCAUCAA G UGGAUGGC | 5321 | GCCATCCA GGCTAGCTACAACGA TTGATGGG | 6309 |
| 2839 | UCAAGUGG A UGGCGCUG | 5322 | CAGCGCCA GGCTAGCTACAACGA CCACTTGA | 6310 |
| 2842 | AGUGGAUG G CGCUGGAG | 5323 | CTCCAGCG GGCTAGCTACAACGA CATCCACT | 6311 |
| 2844 | UGGAUGGC G CUGGAGUC | 5324 | GACTCCAG GGCTAGCTACAACGA GCCATCCA | 6312 |
| 2850 | GCGCUGGA G UCCAUUCU | 5325 | AGAATGGA GGCTAGCTACAACGA TCCAGCGC | 6313 |
| 2854 | UGGAGUCC A UUCUCCGC | 5326 | GCGGAGAA GGCTAGCTACAACGA GGACTCCA | 6314 |
| 2861 | CAUUCUCC G CCGGCGGU | 5327 | ACCGCCGG GGCTAGCTACAACGA GGAGAATG | 6315 |
| 2865 | CUCCGCCG G CGGUUCAC | 5328 | GTGAACCG GGCTAGCTACAACGA CGGCGGAG | 6316 |
| 2868 | CGCCGGCG G UUCACCCA | 5329 | TGGGTGAA GGCTAGCTACAACGA CGCCGGCG | 6317 |
| 2872 | GGCGGUUC A CCCACCAG | 5330 | CTGGTGGG GGCTAGCTACAACGA GAACCGCC | 6318 |
| 2876 | GUUCACCC A CCAGAGUG | 5331 | CACTCTGG GGCTAGCTACAACGA GGGTGAAC | 6319 |
| 2882 | CCACCAGA G UGAUGUGU | 5332 | ACACATCA GGCTAGCTACAACGA TCTGGTGG | 6320 |
| 2885 | CCAGAGUG A UGUGUGGA | 5333 | TCCACACA GGCTAGCTACAACGA CACTCTGG | 6321 |
| 2887 | AGAGUGAU G UGUGGAGU | 5334 | ACTCCACA GGCTAGCTACAACGA ATCACTCT | 6322 |
| 2889 | AGUGAUGU G UGGAGUUA | 5335 | TAACTCCA GGCTAGCTACAACGA ACATCACT | 6323 |
| 2894 | UGUGUGGA G UUAUGGUG | 5336 | CACCATAA GGCTAGCTACAACGA TCCACACA | 6324 |
| 2897 | GUGGAGUU A UGGUGUGA | 5337 | TCACACCA GGCTAGCTACAACGA AACTCCAC | 6325 |
| 2900 | GAGUUAUG G UGUGACUG | 5338 | CAGTCACA GGCTAGCTACAACGA CATAACTC | 6326 |
| 2902 | GUUAUGGU G UGACUGUG | 5339 | CACAGTCA GGCTAGCTACAACGA ACCATAAC | 6327 |
| 2905 | AUGGUGUG A CUGUGUGG | 5340 | CCACACAG GGCTAGCTACAACGA CACACCAT | 6328 |
| 2908 | GUGUGACU G UGUGGGAG | 5341 | CTCCCACA GGCTAGCTACAACGA AGTCACAC | 6329 |
| 2910 | GUGACUGU G UGGGAGCU | 5342 | AGCTCCCA GGCTAGCTACAACGA ACAGTCAC | 6330 |
| 2916 | GUGUGGGA G CUGAUGAC | 5343 | GTCATCAG GGCTAGCTACAACGA TCCCACAC | 6331 |
| 2920 | GGGAGCUG A UGACUUUU | 5344 | AAAAGTCA GGCTAGCTACAACGA CAGCTCCC | 6332 |
| 2923 | AGCUGAUG A CUUUUGGG | 5345 | CCCAAAAG GGCTAGCTACAACGA CATCAGCT | 6333 |
| 2932 | CUUUUGGG G CCAAACCU | 5346 | AGGTTTGG GGCTAGCTACAACGA CCCAAAAG | 6334 |
| 2937 | GGGGCCAA A CCUUACGA | 5347 | TCGTAAGG GGCTAGCTACAACGA TTGGCCCC | 6335 |
| 2942 | CAAACCUU A CGAUGGGA | 5348 | TCCCATCG GGCTAGCTACAACGA AAGGTTTG | 6336 |
| 2945 | ACCUUACG A UGGGAUCC | 5349 | GGATCCCA GGCTAGCTACAACGA CGTAAGGT | 6337 |
| 2950 | ACGAUGGG A UCCCAGCC | 5350 | GGCTGGGA GGCTAGCTACAACGA CCCATCGT | 6338 |
| 2956 | GGAUCCCA G CCCGGGAG | 5351 | CTCCCGGG GGCTAGCTACAACGA TGGGATCC | 6339 |
| 2965 | CCCGGGAG A UCCCUGAC | 5352 | GTCAGGGA GGCTAGCTACAACGA CTCCCGGG | 6340 |
| 2972 | GAUCCCUG A CCUGCUGG | 5353 | CCAGCAGG GGCTAGCTACAACGA CAGGGATC | 6341 |
| 2976 | CCUGACCU G CUGGAAAA | 5354 | TTTTCCAG GGCTAGCTACAACGA AGGTCAGG | 6342 |
| 2991 | AAGGGGGA G CGGCUGCC | 5355 | GGCAGCCG GGCTAGCTACAACGA TCCCCCTT | 6343 |
| 2994 | GGGGAGCG G CUGCCCCA | 5356 | TGGGGCAG GGCTAGCTACAACGA CGCTCCCC | 6344 |
| 2997 | GAGCGGCU G CCCCAGCC | 5357 | GGCTGGGG GGCTAGCTACAACGA AGCCGCTC | 6345 |
| 3003 | CUGCCCCA G CCCCCCAU | 5358 | ATGGGGGG GGCTAGCTACAACGA TGGGGCAG | 6346 |
| 3010 | AGCCCCCC A UCUGCACC | 5359 | GGTGCAGA GGCTAGCTACAACGA GGGGGGCT | 6347 |
| 3014 | CCCCAUCU G CACCAUUG | 5360 | CAATGGTG GGCTAGCTACAACGA AGATGGGG | 6348 |
| 3016 | CCAUCUGC A CCAUUGAU | 5361 | ATCAATGG GGCTAGCTACAACGA GCAGATGG | 6349 |
| 3019 | UCUGCACC A UUGAUGUC | 5362 | GACATCAA GGCTAGCTACAACGA GGTGCAGA | 6350 |
| 3023 | CACCAUUG A UGUCUACA | 5363 | TGTAGACA GGCTAGCTACAACGA CAATGGTG | 6351 |
| 3025 | CCAUUGAU G UCUACAUG | 5364 | CATGTAGA GGCTAGCTACAACGA ATCAATGG | 6352 |
| 3029 | UGAUGUCU A CAUGAUCA | 5365 | TGATCATG GGCTAGCTACAACGA AGACATCA | 6353 |
| 3031 | AUGUCUAC A UGAUCAUG | 5366 | CATGATCA GGCTAGCTACAACGA GTAGACAT | 6354 |
| 3034 | UCUACAUG A UCAUGGUC | 5367 | GACCATGA GGCTAGCTACAACGA CATGTAGA | 6355 |
| 3037 | ACAUGAUC A UGGUCAAA | 5368 | TTTGACCA GGCTAGCTACAACGA GATCATGT | 6356 |
| 3040 | UGAUCAUG G UCAAAUGU | 5369 | ACATTTGA GGCTAGCTACAACGA CATGATCA | 6357 |
| 3045 | AUGGUCAA A UGUUGGAU | 5370 | ATCCAACA GGCTAGCTACAACGA TTGACCAT | 6358 |
| 3047 | GGUCAAAU G UUGGAUGA | 5371 | TCATCCAA GGCTAGCTACAACGA ATTTGACC | 6359 |
| 3052 | AAUGUUGG A UGAUUGAC | 5372 | GTCAATCA GGCTAGCTACAACGA CCAACATT | 6360 |
| 3055 | GUUGGAUG A UUGACUCU | 5373 | AGAGTCAA GGCTAGCTACAACGA CATCCAAC | 6361 |
| 3059 | GAUGAUUG A CUCUGAAU | 5374 | ATTCAGAG GGCTAGCTACAACGA CAATCATC | 6362 |
| 3066 | GACUCUGA A UGUCGGCC | 5375 | GGCCGACA GGCTAGCTACAACGA TCAGAGTC | 6363 |
| 3068 | CUCUGAAU G UCGGCCAA | 5376 | TTGGCCGA GGCTAGCTACAACGA ATTCAGAG | 6364 |
| 3072 | GAAUGUCG G CCAAGAUU | 5377 | AATCTTGG GGCTAGCTACAACGA CGACATTC | 6365 |
| 3078 | CGGCCAAG A UUCCGGGA | 5378 | TCCCGGAA GGCTAGCTACAACGA CTTGGCCG | 6366 |
| 3087 | UUCCGGGA G UUGGUGUC | 5379 | GACACCAA GGCTAGCTACAACGA TCCCGGAA | 6367 |
| 3091 | GGGAGUUG G UGUCUGAA | 5380 | TTCAGACA GGCTAGCTACAACGA CAACTCCC | 6368 |
| 3093 | GAGUUGGU G UCUGAAUU | 5381 | AATTCAGA GGCTAGCTACAACGA ACCAACTC | 6369 |
| 3099 | GUGUCUGA A UUCUCCCG | 5382 | CGGGAGAA GGCTAGCTACAACGA TCAGACAC | 6370 |
| 3107 | AUUCUCCC G CAUGGCCA | 5383 | TGGCCATG GGCTAGCTACAACGA GGGAGAAT | 6371 |
| 3109 | UCUCCCGC A UGGCCAGG | 5384 | CCTGGCCA GGCTAGCTACAACGA GCGGGAGA | 6372 |
| 3112 | CCCGCAUG G CCAGGGAC | 5385 | GTCCCTGG GGCTAGCTACAACGA CATGCGGG | 6373 |
| 3119 | GGCCAGGG A CCCCCAGC | 5386 | GCTGGGGG GGCTAGCTACAACGA CCCTGGCC | 6374 |
| 3126 | GACCCCCA G CGCUUUGU | 5387 | ACAAAGCG GGCTAGCTACAACGA TGGGGGTC | 6375 |
| 3128 | CCCCCAGC G CUUUGUGG | 5388 | CCACAAAG GGCTAGCTACAACGA GCTGGGGG | 6376 |
| 3133 | AGCGCUUU G UGGUCAUC | 5389 | GATGACCA GGCTAGCTACAACGA AAAGCGCT | 6377 |
| 3136 | GCUUUGUG G UCAUCCAG | 5390 | CTGGATGA GGCTAGCTACAACGA CACAAAGC | 6378 |
| 3139 | UUGUGGUC A UCCAGAAU | 5391 | ATTCTGGA GGCTAGCTACAACGA GACCACAA | 6379 |
| 3146 | CAUCCAGA A UGAGGACU | 5392 | AGTCCTCA GGCTAGCTACAACGA TCTGGATG | 6380 |
| 3152 | GAAUGAGG A CUUGGGCC | 5393 | GGCCCAAG GGCTAGCTACAACGA CCTCATTC | 6381 |
| 3158 | GGACUUGG G CCCAGCCA | 5394 | TGGCTGGG GGCTAGCTACAACGA CCAAGTCC | 6382 |
| 3163 | UGGGCCCA G CCAGUCCC | 5395 | GGGACTGG GGCTAGCTACAACGA TGGGCCCA | 6383 |
| 3167 | CCCAGCCA G UCCCUUGG | 5396 | CCAAGGGA GGCTAGCTACAACGA TGGCTGGG | 6384 |
| 3176 | UCCCUUGG A CAGCACCU | 5397 | AGGTGCTG GGCTAGCTACAACGA CCAAGGGA | 6385 |
| 3179 | CUUGGACA G CACCUUCU | 5398 | AGAAGGTG GGCTAGCTACAACGA TGTCCAAG | 6386 |
| 3181 | UGGACAGC A CCUUCUAC | 5399 | GTAGAAGG GGCTAGCTACAACGA GCTGTCCA | 6387 |
| 3188 | CACCUUCU A CCGCUCAC | 5400 | GTGAGCGG GGCTAGCTACAACGA AGAAGGTG | 6388 |
| 3191 | CUUCUACC G CUCACUGC | 5401 | GCAGTGAG GGCTAGCTACAACGA GGTAGAAG | 6389 |
| 3195 | UACCGCUC A CUGCUGGA | 5402 | TCCAGCAG GGCTAGCTACAACGA GAGCGGTA | 6390 |
| 3198 | CGCUCACU G CUGGAGGA | 5403 | TCCTCCAG GGCTAGCTACAACGA AGTGAGCG | 6391 |
| 3206 | GCUGGAGG A CGAUGACA | 5404 | TGTCATCG GGCTAGCTACAACGA CCTCCAGC | 6392 |
| 3209 | GGAGGACG A UGACAUGG | 5405 | CCATGTCA GGCTAGCTACAACGA CGTCCTCC | 6393 |
| 3212 | GGACGAUG A CAUGGGGG | 5406 | CCCCCATG GGCTAGCTACAACGA CATCGTCC | 6394 |
| 3214 | ACGAUGAC A UGGGGGAC | 5407 | GTCCCCCA GGCTAGCTACAACGA GTCATCGT | 6395 |
| 3221 | CAUGGGGG A CCUGGUGG | 5408 | CCACCAGG GGCTAGCTACAACGA CCCCCATG | 6396 |
| 3226 | GGGACCUG G UGGAUGCU | 5409 | AGCATCCA GGCTAGCTACAACGA CAGGTCCC | 6397 |
| 3230 | CCUGGUGG A UGCUGAGG | 5410 | CCTCAGCA GGCTAGCTACAACGA CCACCAGG | 6398 |
| 3232 | UGGUGGAU G CUGAGGAG | 5411 | CTCCTCAG GGCTAGCTACAACGA ATCCACCA | 6399 |
| 3240 | GCUGAGGA G UAUCUGGU | 5412 | ACCAGATA GGCTAGCTACAACGA TCCTCAGC | 6400 |
| 3242 | UGAGGAGU A UCUGGUAC | 5413 | GTACCAGA GGCTAGCTACAACGA ACTCCTCA | 6401 |
| 3247 | AGUAUCUG G UACCCCAG | 5414 | CTGGGGTA GGCTAGCTACAACGA CAGATACT | 6402 |
| 3249 | UAUCUGGU A CCCCAGCA | 5415 | TGCTGGGG GGCTAGCTACAACGA ACCAGATA | 6403 |
| 3255 | GUACCCCA G CAGGGCUU | 5416 | AAGCCCTG GGCTAGCTACAACGA TGGGGTAC | 6404 |
| 3260 | CCAGCAGG G CUUCUUCU | 5417 | AGAAGAAG GGCTAGCTACAACGA CCTGCTGG | 6405 |
| 3269 | CUUCUUCU G UCCAGACC | 5418 | GGTCTGGA GGCTAGCTACAACGA AGAAGAAG | 6406 |
| 3275 | CUGUCCAG A CCCUGCCC | 5419 | GGGCAGGG GGCTAGCTACAACGA CTGGACAG | 6407 |
| 3280 | CAGACCCU G CCCCGGGC | 5420 | GCCCGGGG GGCTAGCTACAACGA AGGGTCTG | 6408 |
| 3287 | UGCCCCGG G CGCUGGGG | 5421 | CCCCAGCG GGCTAGCTACAACGA CCGGGGCA | 6409 |
| 3289 | CCCCGGGC G CUGGGGGC | 5422 | GCCCCCAG GGCTAGCTACAACGA GCCCGGGG | 6410 |
| 3296 | CGCUGGGG G CAUGGUCC | 5423 | GGACCATG GGCTAGCTACAACGA CCCCAGCG | 6411 |
| 3298 | CUGGGGGC A UGGUCCAC | 5424 | GTGGACCA GGCTAGCTACAACGA GCCCCCAG | 6412 |
| 3301 | GGGGCAUG G UCCACCAC | 5425 | GTGGTGGA GGCTAGCTACAACGA CATGCCCC | 6413 |
| 3305 | CAUGGUCC A CCACAGGC | 5426 | GCCTGTGG GGCTAGCTACAACGA GGACCATG | 6414 |
| 3308 | GGUCCACC A CAGGCACC | 5427 | GGTGCCTG GGCTAGCTACAACGA GGTGGACC | 6415 |
| 3312 | CACCACAG G CACCGCAG | 5428 | CTGCGGTG GGCTAGCTACAACGA CTGTGGTG | 6416 |
| 3314 | CCACAGGC A CCGCAGCU | 5429 | AGCTGCGG GGCTAGCTACAACGA GCCTGTGG | 6417 |
| 3317 | CAGGCACC G CAGCUCAU | 5430 | ATGAGCTG GGCTAGCTACAACGA GGTGCCTG | 6418 |
| 3320 | GCACCGCA G CUCAUCUA | 5431 | TAGATGAG GGCTAGCTACAACGA TGCGGTGC | 6419 |
| 3324 | CGCAGCUC A UCUACCAG | 5432 | CTGGTAGA GGCTAGCTACAACGA GAGCTGCG | 6420 |
| 3328 | GCUCAUCU A CCAGGAGU | 5433 | ACTCCTGG GGCTAGCTACAACGA AGATGAGC | 6421 |
| 3335 | UACCAGGA G UGGCGGUG | 5434 | CACCGCCA GGCTAGCTACAACGA TCCTGGTA | 6422 |
| 3338 | CAGGAGUG G CGGUGGGG | 5435 | CCCCACCG GGCTAGCTACAACGA CACTCCTG | 6423 |
| 3341 | GAGUGGCG G UGGGGACC | 5436 | GGTCCCCA GGCTAGCTACAACGA CGCCACTC | 6424 |
| 3347 | CGGUGGGG A CCUGACAC | 5437 | GTGTCAGG GGCTAGCTACAACGA CCCCACCG | 6425 |
| 3352 | GGGACCUG A CACUAGGG | 5438 | CCCTAGTG GGCTAGCTACAACGA CAGGTCCC | 6426 |
| 3354 | GACCUGAC A CUAGGGCU | 5439 | AGCCCTAG GGCTAGCTACAACGA GTCAGGTC | 6427 |
| 3360 | ACACUAGG G CUGGAGCC | 5440 | GGCTCCAG GGCTAGCTACAACGA CCTAGTGT | 6428 |
| 3366 | GGGCUGGA G CCCUCUGA | 5441 | TCAGAGGG GGCTAGCTACAACGA TCCAGCCC | 6429 |
| 3382 | AAGAGGAG G CCCCCAGG | 5442 | CCTGGGGG GGCTAGCTACAACGA CTCCTCTT | 6430 |
| 3390 | GCCCCCAG G UCUCCACU | 5443 | AGTGGAGA GGCTAGCTACAACGA CTGGGGGC | 6431 |
| 3396 | AGGUCUCC A CUGGCACC | 5444 | GGTGCCAG GGCTAGCTACAACGA GGAGACCT | 6432 |
| 3400 | CUCCACUG G CACCCUCC | 5445 | GGAGGGTG GGCTAGCTACAACGA CAGTGGAG | 6433 |
| 3402 | CCACUGGC A CCCUCCGA | 5446 | TCGGAGGG GGCTAGCTACAACGA GCCAGTGG | 6434 |
| 3415 | CCGAAGGG G CUGGCUCC | 5447 | GGAGCCAG GGCTAGCTACAACGA CCCTTCGG | 6435 |
| 3419 | AGGGGCUG G CUCCGAUG | 5448 | CATCGGAG GGCTAGCTACAACGA CAGCCCCT | 6436 |
| 3425 | UGGCUCCG A UGUAUUUG | 5449 | CAAATACA GGCTAGCTACAACGA CGGAGCCA | 6437 |
| 3427 | GCUCCGAU G UAUUUGAU | 5450 | ATCAAATA GGCTAGCTACAACGA ATCGGAGC | 6438 |
| 3429 | UCCGAUGU A UUUGAUGG | 5451 | CCATCAAA GGCTAGCTACAACGA ACATCGGA | 6439 |
| 3434 | UGUAUUUG A UGGUGACC | 5452 | GGTCACCA GGCTAGCTACAACGA CAAATACA | 6440 |
| 3437 | AUUUGAUG G UGACCUGG | 5453 | CCAGGTCA GGCTAGCTACAACGA CATCAAAT | 6441 |
| 3440 | UGAUGGUG A CCUGGGAA | 5454 | TTCCCAGG GGCTAGCTACAACGA CACCATCA | 6442 |
| 3448 | ACCUGGGA A UGGGGGCA | 5455 | TGCCCCCA GGCTAGCTACAACGA TCCCAGGT | 6443 |
| 3454 | GAAUGGGG G CAGCCAAG | 5456 | CTTGGCTG GGCTAGCTACAACGA CCCCATTC | 6444 |
| 3457 | UGGGGGCA G CCAAGGGG | 5457 | CCCCTTGG GGCTAGCTACAACGA TGCCCCCA | 6445 |
| 3465 | GCCAAGGG G CUGCAAAG | 5458 | CTTTGCAG GGCTAGCTACAACGA CCCTTGGC | 6446 |
| 3468 | AAGGGGCU G CAAAGCCU | 5459 | AGGCTTTG GGCTAGCTACAACGA AGCCCCTT | 6447 |
| 3473 | GCUGCAAA G CCUCCCCA | 5460 | TGGGGAGG GGCTAGCTACAACGA TTTGCAGC | 6448 |
| 3481 | GCCUCCCC A CACAUGAC | 5461 | GTCATGTG GGCTAGCTACAACGA GGGGAGGC | 6449 |
| 3483 | CUCCCCAC A CAUGACCC | 5462 | GGGTCATG GGCTAGCTACAACGA GTGGGGAG | 6450 |
| 3485 | CCCCACAC A UGACCCCA | 5463 | TGGGGTCA GGCTAGCTACAACGA GTGTGGGG | 6451 |
| 3488 | CACACAUG A CCCCAGCC | 5464 | GGCTGGGG GGCTAGCTACAACGA CATGTGTG | 6452 |
| 3494 | UGACCCCA G CCCUCUAC | 5465 | GTAGAGGG GGCTAGCTACAACGA TGGGGTCA | 6453 |
| 3501 | AGCCCUCU A CAGCGGUA | 5466 | TACCGCTG GGCTAGCTACAACGA AGAGGGCT | 6454 |
| 3504 | CCUCUACA G CGGUACAG | 5467 | CTGTACCG GGCTAGCTACAACGA TGTAGAGG | 6455 |
| 3507 | CUACAGCG G UACAGUGA | 5468 | TCACTGTA GGCTAGCTACAACGA CGCTGTAG | 6456 |
| 3509 | ACAGCGGU A CACUGAGG | 5469 | CCTCACTG GGCTAGCTACAACGA ACCGCTGT | 6457 |
| 3512 | GCGGUACA G UGAGGACC | 5470 | GGTCCTCA GGCTAGCTACAACGA TGTACCGC | 6458 |
| 3518 | CAGUGAGG A CCCCACAG | 5471 | CTGTGGGG GGCTAGCTACAACGA CCTCACTG | 6459 |
| 3523 | AGGACCCC A CAGUACCC | 5472 | GGGTACTG GGCTAGCTACAACGA GGGGTCCT | 6460 |
| 3526 | ACCCCACA G UACCCCUG | 5473 | CAGGGGTA GGCTAGCTACAACGA TGTGGGGT | 6461 |
| 3528 | CCCACAGU A CCCCUGCC | 5474 | GGCAGGGG GGCTAGCTACAACGA ACTGTGGG | 6462 |
| 3534 | GUACCCCU G CCCUCUGA | 5475 | TCAGAGGG GGCTAGCTACAACGA AGGGGTAC | 6463 |
| 3544 | CCUCUGAG A CUCAUGGC | 5476 | GCCATCAG GGCTAGCTACAACGA CTCAGAGG | 6464 |
| 3548 | UGAGACUG A UGGCUACG | 5477 | CGTAGCCA GGCTAGCTACAACGA CAGTCTCA | 6465 |
| 3551 | GACUCAUG G CUACGUUG | 5478 | CAACGTAG GGCTAGCTACAACGA CATCAGTC | 6466 |
| 3554 | UGAUGGCU A CGUUGCCC | 5479 | GGGCAACG GGCTAGCTACAACGA AGCCATCA | 6467 |
| 3556 | AUGGCUAC G UUGCCCCC | 5480 | GGGGGCAA GGCTAGCTACAACGA GTAGCCAT | 6468 |
| 3559 | GCUACGUU G CCCCCCUG | 5481 | CAGGGGGG GGCTAGCTACAACGA AACGTAGC | 6469 |
| 3568 | CCCCCCUG A CCUGCAGC | 5482 | GCTGCAGG GGCTAGCTACAACGA CAGGGGGG | 6470 |
| 3572 | CCUGACCU G CAGCCCCC | 5483 | GGGGGCTG GGCTAGCTACAACGA AGGTCAGG | 6471 |
| 3575 | GACCUGCA G CCCCCAGC | 5484 | GCTGGGGG GGCTAGCTACAACGA TGCAGGTC | 6472 |
| 3582 | AGCCCCCA G CCUGAAUA | 5485 | TATTCAGG GGCTAGCTACAACGA TGGGGGCT | 6473 |
| 3588 | CAGCCUGA A UAUGUCAA | 5486 | TTCACATA GGCTAGCTACAACGA TCAGGCTG | 6474 |
| 3590 | GCCUGAAU A UGUGAACC | 5487 | GGTTCACA GGCTAGCTACAACGA ATTCAGGC | 6475 |
| 3592 | CUGAAUAU G UGAACCAG | 5488 | CTGGTTCA GGCTAGCTACAACGA ATATTCAG | 6476 |
| 3596 | AUAUGUGA A CCAGCCAG | 5489 | CTGGCTGG GGCTAGCTACAACGA TCACATAT | 6477 |
| 3600 | GUGAACCA G CCAGAUGU | 5490 | ACATCTGG GGCTAGCTACAACGA TGGTTCAC | 6478 |
| 3605 | CCAGCCAG A UGUUCGGC | 5491 | GCCGAACA GGCTAGCTACAACGA CTGGCTGG | 6479 |
| 3607 | AGCCAGAU G UUCGGCCC | 5492 | GGGCCGAA GGCTAGCTACAACGA ATCTGGCT | 6480 |
| 3612 | GAUGUUCG G CCCCAGCC | 5493 | GGCTGGGG GGCTAGCTACAACGA CGAACATC | 6481 |
| 3618 | CGGCCCCA G CCCCCUUC | 5494 | GAAGGGGG GGCTAGCTACAACGA TGGGGCCG | 6482 |
| 3627 | CCCCCUUC G CCCCGAGA | 5495 | TCTCGGGG GGCTAGCTACAACGA GAAGGGGG | 6483 |
| 3638 | CCGAGAGG G CCCUCUGC | 5496 | GCAGAGGG GGCTAGCTACAACGA CCTCTCGG | 6484 |
| 3645 | GGCCCUCU G CCUGCUGC | 5497 | GCAGCAGG GGCTAGCTACAACGA AGAGGGCC | 6485 |
| 3649 | CUCUGCCU G CUGCCCGA | 5498 | TCGGGCAG GGCTAGCTACAACGA AGGCAGAG | 6486 |
| 3652 | UGCCUGCU G CCCGACCU | 5499 | AGGTCGGG GGCTAGCTACAACGA AGCAGGCA | 6487 |
| 3657 | GCUGCCCG A CCUGCUGG | 5500 | CCAGCAGG GGCTAGCTACAACGA CGGGCAGC | 6488 |
| 3661 | CCCGACCU G CUGGUGCC | 5501 | GGCACCAG GGCTAGCTACAACGA AGGTCGGG | 6489 |
| 3665 | ACCUGCUG G UGCCACUC | 5502 | GAGTGGCA GGCTAGCTACAACGA CAGCAGGT | 6490 |
| 3667 | CUGCUGGU G CCACUCUG | 5503 | CAGAGTGG GGCTAGCTACAACGA ACCAGCAG | 6491 |
| 3670 | CUGGUGCC A CUCUGGAA | 5504 | TTCCAGAG GGCTAGCTACAACGA GGCACCAG | 6492 |
| 3681 | CUGGAAAG G CCCAAGAC | 5505 | GTCTTGGG GGCTAGCTACAACGA CTTTCCAG | 6493 |
| 3688 | GGCCCAAG A CUCUCUCC | 5506 | GGAGAGAG GGCTAGCTACAACGA CTTGGGCC | 6494 |
| 3707 | AGGGAAGA A UGGGGUCG | 5507 | CGACCCCA GGCTAGCTACAACGA TCTTCCCT | 6495 |
| 3712 | AGAAUGGG G UCGUCAAA | 5508 | TTTGACGA GGCTAGCTACAACGA CCCATTCT | 6496 |
| 3715 | AUGGGGUC G UCAAAGAC | 5509 | GTCTTTGA GGCTAGCTACAACGA GACCCCAT | 6497 |
| 3722 | CGUCAAAG A CGUUUUUG | 5510 | CAAAAACG GGCTAGCTACAACGA CTTTGACG | 6498 |
| 3724 | UCAAAGAC G UUUUUGCC | 5511 | GGCAAAAA GGCTAGCTACAACGA GTCTTTGA | 6499 |
| 3730 | ACGUUUUU G CCUUUGGG | 5512 | CCCAAAGG GGCTAGCTACAACGA AAAAACGT | 6500 |
| 3740 | CUUUGGGG G UGCCGUGG | 5513 | CCACGGCA GGCTAGCTACAACGA CCCCAAAG | 6501 |
| 3742 | UUGGGGGU G CCGUGGAG | 5514 | CTCCACGG GGCTAGCTACAACGA ACCCCCAA | 6502 |
| 3745 | GGGGUGCC G UGGAGAAC | 5515 | GTTCTCCA GGCTAGCTACAACGA GGCACCCC | 6503 |
| 3752 | CGUGGAGA A CCCCGAGU | 5516 | ACTCGGGG GGCTAGCTACAACGA TCTCCACG | 6504 |
| 3759 | AACCCCGA G UACUUGAC | 5517 | GTCAAGTA GGCTAGCTACAACGA TCGGGGTT | 6505 |
| 3761 | CCCCGAGU A CUUGACAC | 5518 | GTGTCAAG GGCTAGCTACAACGA ACTCGGGG | 6506 |
| 3766 | AGUACUUG A CACCCCAG | 5519 | CTGGGGTG GGCTAGCTACAACGA CAAGTACT | 6507 |
| 3768 | UACUUGAC A CCCCAGGG | 5520 | CCCTGGGG GGCTAGCTACAACGA GTCAAGTA | 6508 |
| 3781 | AGGGAGGA G CUGCCCCU | 5521 | AGGGGCAG GGCTAGCTACAACGA TCCTCCCT | 6509 |
| 3784 | GAGGAGCU G CCCCUCAG | 5522 | CTGAGGGG GGCTAGCTACAACGA AGCTCCTC | 6510 |
| 3792 | GCCCCUCA G CCCCACCC | 5523 | GGGTGGGG GGCTAGCTACAACGA TGAGGGGC | 6511 |
| 3797 | UCAGCCCC A CCCUCCUC | 5524 | GAGGAGGG GGCTAGCTACAACGA GGGGCTGA | 6512 |
| 3808 | CUCCUCCU G CCUUCAGC | 5525 | GCTGAAGG GGCTAGCTACAACGA AGGAGGAG | 6513 |
| 3815 | UGCCUUCA G CCCAGCCU | 5526 | AGGCTGGG GGCTAGCTACAACGA TGAAGGCA | 6514 |
| 3820 | UCAGCCCA G CCUUCGAC | 5527 | GTCGAAGG GGCTAGCTACAACGA TGGGCTGA | 6515 |
| 3827 | AGCCUUCG A CAACCUCU | 5528 | AGAGGTTG GGCTAGCTACAACGA CGAAGGCT | 6516 |
| 3830 | CUUCGACA A CCUCUAUU | 5529 | AATAGAGG GGCTAGCTACAACGA TGTCGAAG | 6517 |
| 3836 | CAACCUCU A UUACUGGG | 5530 | CCCAGTAA GGCTAGCTACAACGA AGAGGTTG | 6518 |
| 3839 | CCUCUAUU A CUGGGACC | 5531 | GGTCCCAG GGCTAGCTACAACGA AATAGAGG | 6519 |
| 3845 | UUACUGGG A CCAGGACC | 5532 | GGTCCTGG GGCTAGCTACAACGA CCCAGTAA | 6520 |
| 3851 | GGACCAGG A CCCACCAG | 5533 | CTGGTGGG GGCTAGCTACAACGA CCTGGTCC | 6521 |
| 3855 | CAGGACCC A CCAGAGCG | 5534 | CGCTCTGG GGCTAGCTACAACGA GGGTCCTG | 6522 |
| 3861 | CCACCAGA G CGGGGGGC | 5535 | GCCCCCCG GGCTAGCTACAACGA TCTGGTGG | 6523 |
| 3868 | AGCGGGGG G CUCCACCC | 5536 | GGGTGGAG GGCTAGCTACAACGA CCCCCGCT | 6524 |
| 3873 | GGGGCUCC A CCCAGCAC | 5537 | GTGCTGGG GGCTAGCTACAACGA GGAGCCCC | 6525 |
| 3878 | UCCACCCA G CACCUUCA | 5538 | TGAAGGTG GGCTAGCTACAACGA TGGGTGGA | 6526 |
| 3880 | CACCCAGC A CCUUCAAA | 5539 | TTTGAAGG GGCTAGCTACAACGA GCTGGGTG | 6527 |
| 3892 | UCAAAGGG A CACCUACG | 5540 | CGTAGGTG GGCTAGCTACAACGA CCCTTTGA | 6528 |
| 3894 | AAAGGGAC A CCUACGGC | 5541 | GCCGTAGG GGCTAGCTACAACGA GTCCCTTT | 6529 |
| 3898 | GGACACCU A CGGCAGAG | 5542 | CTCTGCCG GGCTAGCTACAACGA AGGTGTCC | 6530 |
| 3901 | CACCUACG G CAGAGAAC | 5543 | GTTCTCTG GGCTAGCTACAACGA CGTAGGTG | 6531 |
| 3908 | GGCAGAGA A CCCAGAGU | 5544 | ACTCTGGG GGCTAGCTACAACGA TCTCTGCC | 6532 |
| 3915 | AACCCAGA G UACCUGGG | 5545 | CCCAGGTA GGCTAGCTACAACGA TCTGGGTT | 6533 |
| 3917 | CCCAGAGU A CCUGGGUC | 5546 | GACCCAGG GGCTAGCTACAACGA ACTCTGGG | 6534 |
| 3923 | GUACCUGG G UCUGGACG | 5547 | CGTCCAGA GGCTAGCTACAACGA CCAGGTAC | 6535 |
| 3929 | GGGUCUGG A CGUGCCAG | 5548 | CTGGCACG GGCTAGCTACAACGA CCAGACCC | 6536 |
| 3931 | GUCUGGAC G UGCCAGUG | 5549 | CACTGGCA GGCTAGCTACAACGA GTCCAGAC | 6537 |
| 3933 | CUGGACGU G CCAGUGUG | 5550 | CACACTGG GGCTAGCTACAACGA ACGTCCAG | 6538 |
| 3937 | ACGUGCCA G UGUGAACC | 5551 | GGTTCACA GGCTAGCTACAACGA TGGCACGT | 6539 |
| 3939 | GUGCCAGU G UGAACCAG | 5552 | CTGGTTCA GGCTAGCTACAACGA ACTGGCAC | 6540 |
| 3943 | CAGUGUGA A CCAGAAGG | 5553 | CCTTCTGG GGCTAGCTACAACGA TCACACTG | 6541 |
| 3951 | ACCAGAAG G CCAAGUCC | 5554 | GGACTTGG GGCTAGCTACAACGA CTTCTGGT | 6542 |
| 3956 | AAGGCCAA G UCCGCAGA | 5555 | TCTGCGGA GGCTAGCTACAACGA TTGGCCTT | 6543 |
| 3960 | CCAAGUCC G CAGAAGCC | 5556 | GGCTTCTG GGCTAGCTACAACGA GGACTTGG | 6544 |
| 3966 | CCGCAGAA G CCCUGAUG | 5557 | CATCAGGG GGCTAGCTACAACGA TTCTGCGG | 6545 |
| 3972 | AAGCCCUG A UGUGUCCU | 5558 | AGGACACA GGCTAGCTACAACGA CAGGGCTT | 6546 |
| 3974 | GCCCUGAU G UGUCCUCA | 5559 | TGAGGACA GGCTAGCTACAACGA ATCAGGGC | 6547 |
| 3976 | CCUGAUGU G UCCUCAGG | 5560 | CCTGAGGA GGCTAGCTACAACGA ACATCAGG | 6548 |
| 3987 | CUCAGGGA G CAGGGAAG | 5561 | CTTCCCTG GGCTAGCTACAACGA TCCCTGAG | 6549 |
| 3996 | CAGGGAAG G CCUGACUU | 5562 | AAGTCAGG GGCTAGCTACAACGA CTTCCCTG | 6550 |
| 4001 | AAGGCCUG A CUUCUGCU | 5563 | AGCAGAAG GGCTAGCTACAACGA CAGGCCTT | 6551 |
| 4007 | UGACUUCU G CUGGCAUC | 5564 | GATGCCAG GGCTAGCTACAACGA AGAAGTCA | 6552 |
| 4011 | UUCUGCUG G CAUCAAGA | 5565 | TCTTGATG GGCTAGCTACAACGA CAGCAGAA | 6553 |
| 4013 | CUGCUGGC A UCAAGAGG | 5566 | CCTCTTGA GGCTAGCTACAACGA GCCAGCAG | 6554 |
| 4021 | AUCAAGAG G UGGGAGGG | 5567 | CCCTCCCA GGCTAGCTACAACGA CTCTTGAT | 6555 |
| 4029 | GUGGGAGG G CCCUCCGA | 5568 | TCGGAGGG GGCTAGCTACAACGA CCTCCCAC | 6556 |
| 4037 | GCCCUCCG A CCACUUCC | 5569 | GGAAGTGG GGCTAGCTACAACGA CGGAGGGC | 6557 |
| 4040 | CUCCGACC A CUUCCAGG | 5570 | CCTGGAAG GGCTAGCTACAACGA GGTCGGAG | 6558 |
| 4052 | CCAGGGGA A CCUGCCAU | 5571 | ATGGCAGG GGCTAGCTACAACGA TCCCCTGG | 6559 |
| 4056 | GGGAACCU G CCAUGCCA | 5572 | TGGCATGG GGCTAGCTACAACGA AGGTTCCC | 6560 |
| 4059 | AACCUGCC A UGCCAGGA | 5573 | TCCTGGCA GGCTAGCTACAACGA GGCAGGTT | 6561 |
| 4061 | CCUGCCAU G CCAGGAAC | 5574 | GTTCCTGG GGCTAGCTACAACGA ATGGCAGG | 6562 |
| 4068 | UGCCAGGA A CCUGUCCU | 5575 | AGGACAGG GGCTAGCTACAACGA TCCTGGCA | 6563 |
| 4072 | AGGAACCU G UCCUAAGG | 5576 | CCTTAGGA GGCTAGCTACAACGA AGGTTCCT | 6564 |
| 4082 | CCUAAGGA A CCUUCCUU | 5577 | AAGGAAGG GGCTAGCTACAACGA TCCTTAGG | 6565 |
| 4094 | UCCUUCCU G CUUGAGUU | 5578 | AACTCAAG GGCTAGCTACAACGA AGGAAGGA | 6566 |
| 4100 | CUGCUUGA G UUCCCAGA | 5579 | TCTGGGAA GGCTAGCTACAACGA TCAAGCAG | 6567 |
| 4108 | GUUCCCAG A UGGCUGGA | 5580 | TCCAGCCA GGCTAGCTACAACGA CTGGGAAC | 6568 |
| 4111 | CCCAGAUG G CUGGAAGG | 5581 | CCTTCCAG GGCTAGCTACAACGA CATCTGGG | 6569 |
| 4121 | UGGAAGGG G UCCAGCCU | 5582 | AGGCTGGA GGCTAGCTACAACGA CCCTTCCA | 6570 |
| 4126 | GGGGUCCA G CCUCGUUG | 5583 | CAACGAGG GGCTAGCTACAACGA TGGACCCC | 6571 |
| 4131 | CCAGCCUC G UUGGAAGA | 5584 | TCTTCCAA GGCTAGCTACAACGA GAGGCTGG | 6572 |
| 4143 | GAAGAGGA A CAGCACUG | 5585 | CAGTGCTG GGCTAGCTACAACGA TCCTCTTC | 6573 |
| 4146 | GAGGAACA G CACUGGGG | 5586 | CCCCAGTG GGCTAGCTACAACGA TGTTCCTC | 6574 |
| 4148 | GGAACAGC A CUGGGGAG | 5587 | CTCCCCAG GGCTAGCTACAACGA GCTGTTCC | 6575 |
| 4156 | ACUGGGGA G UCUUUGUG | 5588 | CACAAAGA GGCTAGCTACAACGA TCCCCAGT | 6576 |
| 4162 | GAGUCUUU G UGGAUUCU | 5589 | AGAATCCA GGCTAGCTACAACGA AAAGACTC | 6577 |
| 4166 | CUUUGUGG A UUCUGAGG | 5590 | CCTCAGAA GGCTAGCTACAACGA CCACAAAG | 6578 |
| 4174 | AUUCUGAG G CCCUGCCC | 5591 | GGGCAGGG GGCTAGCTACAACGA CTCAGAAT | 6579 |
| 4179 | GAGGCCCU G CCCAAUGA | 5592 | TCATTGGG GGCTAGCTACAACGA AGGGCCTC | 6580 |
| 4184 | CCUGCCCA A UGAGACUC | 5593 | GAGTCTCA GGCTAGCTACAACGA TGGGCAGG | 6581 |
| 4189 | CCAAUGAG A CUCUAGGG | 5594 | CCCTAGAG GGCTAGCTACAACGA CTCATTGG | 6582 |
| 4197 | ACUCUAGG G UCCAGUGG | 5595 | CCACTGGA GGCTAGCTACAACGA CCTAGAGT | 6583 |
| 4202 | AGGGUCCA G UGGAUGCC | 5596 | GGCATCCA GGCTAGCTACAACGA TGGACCCT | 6584 |
| 4206 | UCCAGUGG A UGCCACAG | 5597 | CTGTGGCA GGCTAGCTACAACGA CCACTGGA | 6585 |
| 4208 | CAGUGGAU G CCACAGCC | 5598 | GGCTGTGG GGCTAGCTACAACGA ATCCACTG | 6586 |
| 4211 | UGGAUGCC A CAGCCCAG | 5599 | CTGGGCTG GGCTAGCTACAACGA GGCATCCA | 6587 |
| 4214 | AUGCCACA G CCCAGCUU | 5600 | AAGCTGGG GGCTAGCTACAACGA TGTGGCAT | 6588 |
| 4219 | ACAGCCCA G CUUGGCCC | 5601 | GGGCCAAG GGCTAGCTACAACGA TGGGCTGT | 6589 |
| 4224 | CCAGCUUG G CCCUUUCC | 5602 | GGAAAGGG GGCTAGCTACAACGA CAAGCTGG | 6590 |
| 4239 | CCUUCCAG A UCCUGGGU | 5603 | ACCCAGGA GGCTAGCTACAACGA CTGGAAGG | 6591 |
| 4246 | GAUCCUGG G UACUGAAA | 5604 | TTTCAGTA GGCTAGCTACAACGA CCAGGATC | 6592 |
| 4248 | UCCUGGGU A CUGAAAGC | 5605 | GCTTTCAG GGCTAGCTACAACGA ACCCAGGA | 6593 |
| 4255 | UACUGAAA G CCUUAGGG | 5606 | CCCTAAGG GGCTAGCTACAACGA TTTCAGTA | 6594 |
| 4266 | UUAGGGAA G CUGGCCUG | 5607 | CAGGCCAG GGCTAGCTACAACGA TTCCCTAA | 6595 |
| 4270 | GGAAGCUC G CCUGAGAG | 5608 | CTCTCAGG GGCTAGCTACAACGA CAGCTTCC | 6596 |
| 4284 | GAGGGGAA G CGGCCCUA | 5609 | TAGGGCCG GGCTAGCTACAACGA TTCCCCTC | 6597 |
| 4287 | GGGAAGCG G CCCUAAGG | 5610 | CCTTAGGG GGCTAGCTACAACGA CGCTTCCC | 6598 |
| 4298 | CUAAGGGA G UGUCUAAG | 5611 | CTTAGACA GGCTAGCTACAACGA TCCCTTAG | 6599 |
| 4300 | AAGGGAGU G UCUAAGAA | 5612 | TTCTTAGA GGCTAGCTACAACGA ACTCCCTT | 6600 |
| 4308 | GUCUAAGA A CAAAAGCG | 5613 | CGCTTTTG GGCTAGCTACAACGA TCTTAGAC | 6601 |
| 4314 | GAACAAAA G CGACCCAU | 5614 | ATGGGTCG GGCTAGCTACAACGA TTTTGTTC | 6602 |
| 4317 | CAAAAGCG A CCCAUUCA | 5615 | TGAATGGG GGCTAGCTACAACGA CGCTTTTG | 6603 |
| 4321 | AGCGACCC A UUCAGAGA | 5616 | TCTCTGAA GGCTAGCTACAACGA GGGTCGCT | 6604 |
| 4329 | AUUCAGAG A CUGUCCCU | 5617 | AGGGACAG GGCTAGCTACAACGA CTCTGAAT | 6605 |
| 4332 | CAGAGACU G UCCCUGAA | 5618 | TTCAGGGA GGCTAGCTACAACGA AGTCTCTG | 6606 |
| 4341 | UCCCUGAA A CCUAGUAC | 5619 | GTACTAGG GGCTAGCTACAACGA TTCAGGGA | 6607 |
| 4346 | GAAACCUA G UACUGCCC | 5620 | GGGCAGTA GGCTAGCTACAACGA TAGGTTTC | 6608 |
| 4348 | AACCUAGU A CUGCCCCC | 5621 | GGGGGCAG GGCTAGCTACAACGA ACTAGGTT | 6609 |
| 4351 | CUAGUACU G CCCCCCAU | 5622 | ATGGGGGG GGCTAGCTACAACGA AGTACTAG | 6610 |
| 4358 | UCCCCCCC A UGAGGAAG | 5623 | CTTCCTCA GGCTAGCTACAACGA GGGGGGCA | 6611 |
| 4369 | AGGAAGGA A CAGCAAUG | 5624 | CATTGCTG GGCTAGCTACAACGA TCCTTCCT | 6612 |
| 4372 | AAGGAACA G CAAUGGUG | 5625 | CACCATTG GGCTAGCTACAACGA TGTTCCTT | 6613 |
| 4375 | GAACAGCA A UGGUGUCA | 5626 | TGACACCA GGCTAGCTACAACGA TGCTGTTC | 6614 |
| 4378 | CAGCAAUG G UGUCAGUA | 5627 | TACTGACA GGCTAGCTACAACGA CATTGCTG | 6615 |
| 4380 | GCAAUGGU G UCAGUAUC | 5628 | GATACTGA GGCTAGCTACAACGA ACCATTGC | 6616 |
| 4384 | UGGUGUCA G UAUCCAGG | 5629 | CCTGGATA GGCTAGCTACAACGA TGACACCA | 6617 |
| 4386 | GUGUCAGU A UCCAGGCU | 5630 | AGCCTGGA GGCTAGCTACAACGA ACTGACAC | 6618 |
| 4392 | GUAUCCAG G CUUUGUAC | 5631 | GTACAAAG GGCTAGCTACAACGA CTGGATAC | 6619 |
| 4397 | CAGGCUUU G UACAGAGU | 5632 | ACTCTGTA GGCTAGCTACAACGA AAAGCCTG | 6620 |
| 4399 | GGCUUUGU A CAGAGUGC | 5633 | GCACTCTG GGCTAGCTACAACGA ACAAAGCC | 6621 |
| 4404 | UGUACAGA G UGCUUUUC | 5634 | GAAAAGCA GGCTAGCTACAACGA TCTGTACA | 6622 |
| 4406 | UACAGAGU G CUUUUCUG | 5635 | CAGAAAAG GGCTAGCTACAACGA ACTCTGTA | 6623 |
| 4414 | GCUUUUCU G UUUAGUUU | 5636 | AAACTAAA GGCTAGCTACAACGA AGAAAAGC | 6624 |
| 4419 | UCUGUUUA G UUUUUACU | 5637 | AGTAAAAA GGCTAGCTACAACGA TAAACAGA | 6625 |
| 4425 | UAGUUUUU A CUUUUUUU | 5638 | AAAAAAAG GGCTAGCTACAACGA AAAAACTA | 6626 |
| 4434 | CUUUUUUU G UUUUGUUU | 5639 | AAACAAAA GGCTAGCTACAACGA AAAAAAAG | 6627 |
| 4439 | UUUGUUUU G UUUUUUUA | 5640 | TAAAAAAA GGCTAGCTACAACGA AAAACAAA | 6628 |
| 4451 | UUUUAAAG A UGAAAUAA | 5641 | TTATTTCA GGCTAGCTACAACGA CTTTAAAA | 6629 |
| 4456 | AAGAUGAA A UAAAGACC | 5642 | GGTCTTTA GGCTAGCTACAACGA TTCATCTT | 6630 |
| 4462 | AAAUAAAG A CCCAGGGG | 5643 | CCCCTGGG GGCTAGCTACAACGA CTTTATTT | 6631 |

Input Sequence = HSERB2R.
Cut Site = R/Y
Arm Length = 8.
Core Sequence = GGCTAGCTACAACGA
HSERB2R (Human c-erb-B-2 mRNA; 4473 bp)

[0384] TABLE V
Human HER2 Synthetic DNAzyme and Target molecules

| | | | | | | |
|---|---|---|---|---|---|---|
| | | | Seq | | | |
| Gene | Pos | Target | ID | RPI# | DNAzyme | Seq ID |

| | | | | | | |
|---|---|---|---|---|---|---|
| erbB2 | 377 | CCACCA A UGCCAG | 6632 | 24998 | cuggca GGCTAGCTACAACGA uggugg B | 6637 |
| erbB2 | 766 | UUCUCCG A UGUGUAA | 6633 | 24999 | uuacaca GGCTAGCTACAACGA cggagaa B | 6638 |
| erbB2 | 1202 | UGUGCU A UGGUCU | 6634 | 25000 | agacca GGCTAGCTACAACGA agcaca B | 6639 |
| erbB2 | 1444 | CCUCAGC G UCUUCCA | 6635 | 25001 | uggaaga GGCTAGCTACAACGA gcugagg B | 6640 |
| erbB2 | 1583 | AUCCACC A UAACACC | 6636 | 25002 | gguguua GGCTAGCTACAACGA gguggau B | 6641 |

A, G, C, T (italic) = deoxy
lower case = 2′-O-methyl
B = inverted deoxyabasic derivative

[0385] TABLE VI
Human HIV Hammerhead Ribozyme and Substrate Sequence

| | Seq | | Seq |
|---|---|---|---|
| Substrate | ID | Hammerhead | ID |
| AUAAAGCU U GCCUUGAG | 6642 | CUCAAGGC CUGAUGAGGCCGUUAGGCCGAA AGCUUUAU | 6727 |
| AGGCUAAU U UUUUAGGG | 6643 | CCCUAAAA CUGAUGAGGCCGUUAGGCCGAA AUUAGCCU | 6728 |
| GGCUAAUU U UUUAGGGA | 6644 | UCCCUAAA CUGAUGAGGCCGUUAGGCCGAA AAUUAGCC | 6729 |
| GCCUCAAU A AAGCUUGC | 6645 | GCAAGCUU CUGAUGAGGCCGUUAGGCCGAA AUUGAGGC | 6730 |
| UUUCGGGU U UAUUACAG | 6646 | CUGUAAUA CUGAUGAGGCCGUUAGGCCGAA ACCCGAAA | 6731 |
| GCAGGACU C GGCUUGCU | 6647 | AGCAAGCC CUGAUGAGGCCGUUAGGCCGAA AGUCCUGC | 6732 |

Input Sequence = HIV1.
Cut Site = UH/.
Arm Length = 8.
Core Sequence = CUGAUGAG GCCGUUAGGC CGAA
HIV1 Consensus
Underlined region can be any X sequence or linker, as described herein.

[0386] TABLE VII
Human HIV Inozyme and Substrate Sequence

| | Seq | | Seq |
|---|---|---|---|
| Substrate | ID | Inozyme | ID |
| UGGAAAAC A GAUGGCAG | 6648 | CUGCCAUC CUGAUGAGGCCGUUAGGCCGAA IUUUUCCA | 6733 |
| AAUAAAGC U UGCCUUGA | 6649 | UCAAGGCA CUGAUGAGGCCGUUAGGCCGAA ICUUUAUU | 6734 |
| UCUCUAGC A GUGGCGCC | 6650 | GGCGCCAC CUGAUGAGGCCGUUAGGCCGAA ICUAGAGA | 6735 |
| GGAGCCAC C CCACAAGA | 6651 | UCUUGUGG CUGAUGAGGCCGUUAGGCCGAA IUGGCUCC | 6736 |
| AGUGGCGC C CGAACAGG | 6652 | CCUGUUCG CUGAUGAGGCCGUUAGGCCGAA ICGCCACU | 6737 |
| GUGGCGCC C GAACAGGG | 6653 | CCCUGUUC CUGAUGAGGCCGUUAGGCCGAA IGCGCCAC | 6738 |
| CUCGACGC A GGACUCGG | 6654 | CCGAGUCC CUGAUGAGGCCGUUAGGCCGAA ICGUCGAG | 6739 |
| CGCAGGAC U CGGCUUGC | 6655 | GCAAGCCG CUGAUGAGGCCGUUAGGCCGAA IUCCUGCG | 6740 |

Input Sequence = HIV1.
Cut Site = CH/.
Arm Length = 8.
Core Sequence = CUGAUGAG GCCGUUAGGC CGAA
HIV1 Consensus
Underlined region can be any X sequence or linker, as described herein.
“I” stands for Inosine.

[0387] TABLE VIII
Human HIV Zinzyme and Substrate Sequence

| | Seq | | Seq |
|---|---|---|---|
| Substrate | ID | Zinzyme | ID |
| UCAAUAAA G CUUGCCUU | 6656 | AAGGCAAG GCCGAAAGGCGAGUGAGGUCU UUUAUUGA | 6741 |
| AGGACUCG G CUUGCUGA | 6657 | UCAGCAAG GCCGAAAGGCGAGUGAGGUCU CGAGUCCU | 6742 |
| GCAGUGGC G CCCGAACA | 6658 | UGUUCGGG GCCGAAAGGCGAGUGAGGUCU GCCACUGC | 6743 |
| CUCUAGCA G UGGCGCCC | 6659 | GGGCGCCA GCCGAAAGGCGAGUGAGGUCU UGCUAGAG | 6744 |
| UAGCAGUG G CGCCCGAA | 6660 | UUCGGGCG GCCGAAAGGCGAGUGAGGUCU CACUGCUA | 6745 |
| AGAGAUGG G UGCGAGAG | 6661 | CUCUCGCA GCCGAAAGGCGAGUGAGGUCU CCAUCUCU | 6746 |
| AGAUGGGU G CGAGAGCG | 6662 | CGCUCUCG GCCGAAAGGCGAGUGAGGUCU ACCCAUCU | 6747 |
| CUCUCGAC G CAGGACUC | 6663 | GAGUCCUG GCCGAAAGGCGAGUGAGGUCU GUCGAGAG | 6748 |

Input Sequence = HIV1.
Cut Site = G/Y
Arm Length = 8.
Core Sequence = GCcgaaagGCGaGuCaaGGuCu
HIV1 Consensus

[0388] TABLE IX
Human HIV DNAzyme and Substrate Sequence

| | Seq | | Seq |
|---|---|---|---|
| Substrate | ID | DNAzyme | ID |
| UCAAUAAA G CUUGCCUU | 6656 | AAGGCAAG GGCTAGCTACAACGA TTTATTGA | 6749 |
| AGGACUCG G CUUGCUGA | 6657 | TCAGCAAG GGCTAGCTACAACGA CGAGTCCT | 6750 |
| GCAGUGGC G CCCGAACA | 6658 | TGTTCGGG GGCTAGCTACAACGA GCCACTGC | 6751 |
| CUCUAGCA G UGGCGCCC | 6659 | GGGCGCCA GGCTAGCTACAACGA TGCTAGAG | 6752 |
| UAGCAGUG G CGCCCGAA | 6660 | TTCGGGCG GGCTAGCTACAACGA CACTGCTA | 6753 |
| AGAGAUGG G UGCGAGAG | 6661 | CTCTCGCA GGCTAGCTACAACGA CCATCTCT | 6754 |
| AGAUGGGU G CGAGAGCG | 6662 | CGCTCTCG GGCTAGCTACAACGA ACCCATCT | 6755 |
| CUCUCGAC G CAGGACUC | 6663 | GAGTCCTG GGCTAGCTACAACGA GTCGAGAG | 6756 |
| UAUGGAAA A CAGAUGGC | 6664 | GCCATCTG GGCTAGCTACAACGA TTTCCATA | 6757 |
| GAAAACAG A UGGCAGGU | 6665 | ACCTGCCA GGCTAGCTACAACGA CTGTTTTC | 6758 |
| AAGCCUCA A UAAAGCUU | 6666 | AAGCTTTA GGCTAGCTACAACGA TGAGGCTT | 6759 |
| GGAGAGAG A UGGGUGCG | 6667 | CGCACCCA GGCTAGCTACAACGA CTCTCTCC | 6760 |
| GACGCAGG A CUCGGCUU | 6668 | AAGCCGAG GGCTAGCTACAACGA CCTGCGTC | 6761 |

Input Sequence = HIV1.
Cut Site = R/Y
Arm Length = 8.
Core Sequence = GGCTAGCTACAACGA
HIV1 Consensus

[0389] TABLE X
Human HIV Amberzyme and Substrate Sequence

| | Seq | | Seq |
|---|---|---|---|
| Substrate | ID | Amberzyme | ID |
| UCAAUAAA G CUUGCCUU | 6656 | AAGGCAAG GGAGGAAACUCC CU UCAAGGACAUCGUCCGGG UUUAUUGA | 6762 |
| AGGACUCG G CUUGCUGA | 6657 | UCAGCAAG GGAGGAAACUCC CU UCAAGGACAUCGUCCGGG CGAGUCCU | 6763 |
| GCAGUGGC G CCCGAACA | 6658 | UGUUCGGG GGAGGAAACUCC CU UCAAGGACAUCGUCCGGG GCCACUGC | 6764 |
| CUCUAGCA G UGGCGCCC | 6659 | GGGCGCCA GGAGGAAACUCC CU UCAAGGACAUCGUCCGGG UGCUAGAG | 6765 |
| UAGCAGUG G CGCCCGAA | 6660 | UUCGGGCG GGAGGAAACUCC CU UCAAGGACAUCGUCCGGG CACUGCUA | 6766 |
| AGAGAUGG G UGCGAGAG | 6661 | CUCUCGCA GGAGGAAACUCC CU UCAAGGACAUCGUCCGGG CCAUCUCU | 6767 |
| AGAUGGGU G CGAGAGCG | 6662 | CGCUCUCG GGAGGAAACUCC CU UCAAGGACAUCGUCCGGG ACCCAUCU | 6768 |
| CUCUCGAC G CAGGACUC | 6663 | GAGUCCUG GGAGGAAACUCC CU UCAAGGACAUCGUCCGGG GUCGAGAG | 6769 |
| GGAAAACA G AUGGCAGG | 6669 | CCUGCCAU GGAGGAAACUCC CU UCAAGGACAUCGUCCGGG UGUUUUCC | 6770 |
| AUGGGUGC G AGAGCGUC | 6670 | GACGCUCU GGAGGAAACUCC CU UCAAGGACAUCGUCCGGG GCACCCAU | 6771 |
| AAAAGGGG G GAUUGGGG | 6671 | CCCCAAUC GGAGGAAACUCC CU UCAAGGACAUCGUCCGGG CCCCUUUU | 6772 |
| AGAAAAGG G GGGAUUGG | 6672 | CCAAUCCC GGAGGAAACUCC CU UCAAGGACAUCGUCCGGG CCUUUUCU | 6773 |
| GAAAAGGG G GGAUUGGG | 6673 | CCCAAUCC GGAGGAAACUCC CU UCAAGGACAUCGUCCGGG CCCUUUUC | 6774 |
| GGCUAGAA G GAGAGAGA | 6674 | UCUCUCUC GGAGGAAACUCC CU UCAAGGACAUCGUCCGGG UUCUAGCC | 6775 |
| UUUUAAAA G AAAAGGGG | 6675 | CCCCUUUU GGAGGAAACUCC CU UCAAGGACAUCGUCCGGG UUUUAAAA | 6776 |
| UAUGGCAG G AAGAAGCG | 6676 | CGCUUCUU GGAGGAAACUCC CU UCAAGGACAUCGUCCGGG CUGCCAUA | 6777 |
| UGGCGCCC G AACAGGGA | 6677 | UCCCUGUU GGAGGAAACUCC CU UCAAGGACAUCGUCCGGG GGGCGCCA | 6778 |
| GAGAGAUG G GUGCGAGA | 6678 | UCUCGCAC GGAGGAAACUCC CU UCAAGGACAUCGUCCGGG CAUCUCUC | 6779 |
| CGACGCAG G ACUCGGCU | 6679 | AGCCGAGU GGAGGAAACUCC CU UCAAGGACAUCGUCCGGG CUGCGUCG | 6780 |
| UGACUAGC G GAGGCUAG | 6680 | CUAGCCUC GGAGGAAACUCC CU UCAAGGACAUCGUCCGGG GCUAGUCA | 6781 |
| UAGAAGGA G AGAGAUGG | 6681 | CCAUCUCU GGAGGAAACUCC CU UCAAGGACAUCGUCCGGG UCCUUCUA | 6782 |
| AGGAGAGA G AUGGGUGC | 6682 | GCACCCAU GGAGGAAACUCC CU UCAAGGACAUCGUCCGGG UCUCUCCU | 6783 |
| GAAGGAGA G AGAUGGGU | 6683 | ACCCAUCU GGAGGAAACUCC CU UCAAGGACAUCGUCCGGG UCUCCUUC | 6784 |
| UCGACGCA G GACUCGGC | 6684 | GCCGAGUC GGAGGAAACUCC CU UCAAGGACAUCGUCCGGG UGCGUCGA | 6785 |
| CUAGCAGU G GCGCCCGA | 6685 | UCGGGCGC GGAGGAAACUCC CU UCAAGGACAUCGUCCGGG ACUGCUAG | 6786 |
| GACUAGCG G AGGCUAGA | 6686 | UCUAGCCU GGAGGAAACUCC CU UCAAGGACAUCGUCCGGG CGCUAGUC | 6787 |
| GCUAGAAG G AGAGAGAU | 6687 | AUCUCUCU GGAGGAAACUCC CU UCAAGGACAUCGUCCGGG CUUCUAGC | 6788 |
| AAAGGGGG G AUUGGGGG | 6688 | CCCCCAAU GGAGGAAACUCC CU UCAAGGACAUCGUCCGGG CCCCCUUU | 6789 |

Input Sequence = HIV1.
Cut Site = G/.
Arm Length = 8.
Core Sequence = GGAGGAAACUCC CU UCAAGGACAUCGUCCGGG
HIV1 Consensus

[0390] TABLE XI
Human HIV Enzymatic Nucleic Acid and Target molecules

| | | | | |
|---|---|---|---|---|
| Target | Seq ID | RPI# | Enzymatic Nucleic Acid | Seq ID |

| | | | | |
|---|---|---|---|---|
| GAGAUGG G UGCGAGA | 6718 | 25003 | ucucgca GGCTAGCTACAACGA ccaucuc B | 6790 |
| AUGGAAA A CAGAUGG | 6719 | 25004 | ccaucug GGCTAGCTACAACGA uuuccau B | 6791 |
| AAAACAG A UGGCAGG | 6720 | 25005 | ccugcca GGCTAGCTACAACGA cuguuuu B | 6792 |
| AGCCUCA A UAAAGCU | 6721 | 25006 | agcuuua GGCTAGCTACAACGA ugaggcu B | 6793 |
| GAGAGAG A UGGGUGC | 6722 | 25007 | gcaccca GGCTAGCTACAACGA cucucuc B | 6794 |
| CAAUAAA G CUUGCCU | 6723 | 25008 | aggcaag gccgaaaggCgagugaGGuCu uuuauug B | 6795 |
| GGACUCG G CUUGCUG | 6724 | 25009 | cagcaag gccgaaaggCgagugaGGuCu cgagucc B | 6796 |
| GAGAUGG G UGCGAGA | 6718 | 25010 | ucucgca gccgaaaggCgagugaGGuCu ccaucuc B | 6797 |
| GAUGGGU G CGAGAGC | 6725 | 25011 | gcucucg gccgaaaggCgagugaGGuCu acccauc B | 6798 |
| UCUCGAC G CAGGACU | 6726 | 25012 | aguccug gccgaaaggCgagugaGGuCu gucgaga B | 6799 |

G = Guanosine
A, G, C, T (italic) = deoxy
lower case = 2′-O-methyl
s = phosphorothioate 3′-internucleotide linkage
C = 2′-deoxy-2′-Amino cytidine
B = inverted deoxyabasic derivative

[0391] TABLE XII
Human HIV-1 Sequences

| Genbank | | | |
|---|---|---|---|
| Acc# | Seq Name(s) | Subtype | Organism |
| A04321 | IIIB LAI | B | HIV-1 |
| AF110962 | 96BW0402 | C | HIV-1 |
| AF110963 | 96BW0407 | C | HIV-1 |
| AF110968 | 96BW0504 | C | HIV-1 |
| AF110965 | 96BW0409 | C | HIV-1 |
| AF110966 | 96BW0410 | C | HIV-1 |
| AF110964 | 96BW0408 | C | HIV-1 |
| AF110975 | 96BW15C05 | C | HIV-1 |
| AF110974 | 96BW15C02 | C | HIV-1 |
| AF110973 | 96BW15B03 | C | HIV-1 |
| AF107771 | UGSE8131 | A | HIV-1 |
| U69585 | WCIPR854 | B | HIV-1 |
| U69588 | WCIPR855 | B | HIV-1 |
| U69589 | WCIPR9011 | B | HIV-1 |
| U69591 | WCIPR9018 | B | HIV-1 |
| U69592 | WCIPR9031 | B | HIV-1 |
| U69593 | WCIPR9032 | B | HIV-1 |
| U69586 | WCIPR8546 | B | HIV-1 |
| AF003888 | NL43WC001 | B | HIV-1 |
| X01762 | REHTLV3 LAI IIIB | B | HIV-1 |
| AF075719 | MNTQ MNcloneTQ | B | HIV-1 |
| AJ239083 | 97CAMP645MO | MO | HIV-1 |
| D86069 | PM213 | B | HIV-1 |
| K02083 | PV22 | B | HIV-1 |
| M93259 | YU10 | B | HIV-1 |
| Z11530 | F12CG | B | HIV-1 |
| AB032740 | TH022 95TNIH022 | CRF01_AE | HIV-1 |
| AF107770 | SE7812 | CRF02_AG | HIV-1 |
| AF070521 | NL43E9 | B | HIV-1 |
| AF033819 | HXB2-copy LAI | B | HIV-1 |
| AF003887 | WC001 | B | HIV-1 |
| AF069140 | DH123 | B | HIV-1 |
| AF110967 | 96BW0502 | C | HIV-1 |
| K03455 | HXB2 HXB2CG | B | HIV-1 |
| M96155 | P896 89.6 | B | HIV-1 |
| X04415 | MAL MALCG | ADK | HIV-1 |
| AF133821 | MB2059 | D | HIV-1 |
| D86068 | MCK1 | B | HIV-1 |
| U69587 | WCIPR8552 | B | HIV-1 |
| U69590 | WCIPR9012 | B | HIV-1 |
| AB032741 | 95TNIH047 TH047 | CRF01_AE | HIV-1 |
| AB023804 | 93IN101 | C | HIV-1 |
| AF193275 | 97BL006 | A | HIV-1 |
| AF197340 | 90CF11697 | CRF01_AE | HIV-1 |
| AF224507 | WK | B | HIV-1 |
| AJ271445 | GB8 GB8-46R | B | HIV-1 |
| AF197338 | 93TH057 | CRF01_AE | HIV-1 |
| AF197339 | 93TH065 | CRF01_AE | HIV-1 |
| AF197341 | 90CF4071 | CRF01_AE | HIV-1 |
| U69584 | 85WCIPR54 | B | HIV-1 |
| L31963 | TH475A LAI | B | HIV-1 |
| U46016 | ETH2220 C2220 | C | HIV-1 |
| U21135 | WEAU160 GHOSH | B | HIV-1 |
| AF042106 | MBCC18R01 | B | HIV-1 |
| K03454 | ELI | D | HIV-1 |
| U51188 | 90CF402 90CR402 | CRF01_AE | HIV-1 |
| U51189 | 93TH253 | CRF01_AE | HIV-1 |
| U34603 | H0320-2A12 | B | HIV-1 |
| M38429 | JRCSF JR-CSF | B | HIV-1 |
| M17451 | RF HAT3 | B | HIV-1 |
| L02317 | BC BCSG3 | B | HIV-1 |
| M93258 | YU2 YU2X | B | HIV-1 |
| M22639 | Z2Z6 Z2 CDC-Z34 | D | HIV-1 |
| AF004394 | AD8, AD87 ADA | B | HIV-1 |
| AF049337 | 94CY032-3 | CRF04_cpx | HIV-1 |
| U34604 | 3202A21 | B | HIV-1 |
| L20587 | ANT70 | O | HIV-1 |
| D10112 | CAM1 | B | HIV-1 |
| U54771 | CM240 | CRF01_AE | HIV-1 |
| U43096 | D31 | B | HIV-1 |
| U37270 | C18MBC | B | HIV-1 |
| U43141 | HAN | B | HIV-1 |
| U23487 | MANC | B | HIV-1 |
| M17449 | MNCG MN | B | HIV-1 |
| L20571 | MVP5180 | O | HIV-1 |
| M27323 | NDK | D | HIV-1 |
| M38431 | NY5CG | B | HIV-1 |
| M26727 | OYI, 397 | B | HIV-1 |
| K02007 | SF2 LAV2 ARV2 | B | HIV-1 |
| M62320 | U455 U455A | A | HIV-1 |
| U26546 | WR27 | B | HIV-1 |
| AF004885 | Q23 | A | HIV-1 |
| AF042100 | MBC200 | B | HIV-1 |
| AF042101 | MBC925 | B | HIV-1 |
| AJ006287 | 89SP061 89ES061 | B | HIV-1 |
| AF067154 | 93IN999 301999 | C | HIV-1 |
| AF067155 | 95IN21068 21068 | C | HIV-1 |
| AJ006022 | YBF30 | N | HIV-1 |
| AF061642 | SE6165 G6165 | G | HIV-1 |
| AF119820 | 97PVCH GR11 | CRF04_cpx | HIV-1 |
| AF119819 | 97PVMY GR84 | CRF04_cpx | HIV-1 |
| K02013 | LAI BRU | B | HIV-1 |
| L39106 | IBNG | CRF02_AG | HIV-1 |
| U12055 | LW123 | B | HIV-1 |
| M19921 | NL43 pNL43 | B | HIV-1 |
| AF061640 | HH8793-1.1 | G | HIV-1 |
| AF061641 | HH8793-12.1 | G | HIV-1 |
| AF063223 | DJ263 | CRF02_AG | HIV-1 |
| AF049495 | NC7 | B | HIV-1 |
| AF049494 | 499JC16 | B | HIV-1 |
| AF086817 | TWCYS LM49 | B | HIV-1 |
| AF064699 | BFP90 | CRF06_cpx | HIV-1 |
| AF084936 | DRCBL | G | HIV-1 |
| AF193253 | VI1310 AF193253 | CRF05_DF | HIV-1 |
| AF190127 | VI991 | H | HIV-1 |
| AF193276 | KAL153-2 | CRF03_AB | HIV-1 |
| AF192135 | BW2117 | AJ | HIV-1 |
| AJ288982 | 95ML127 | CRF06_cpx | HIV-1 |
| AJ288981 | 97SE1078 | CRF06_cpx | HIV-1 |
| AJ271370 | YBF106 | N | HIV-1 |
| AJ237565 | 97NOGIL3 | ADHK | HIV-1 |

1. A double stranded short interfering RNA (siRNA) molecule that comprises a first nucleotide sequence complementary to RNA sequence encoding HER2 or a portion thereof, and a second nucleotide sequence having complementarity to said first sequence, wherein said first sequence and said second sequence independently comprise from about 19 nucleotides to about 23 nucleotides, and wherein said siRNA includes at least one nucleotide that is not a 2′-OH containing ribonucleotide.

2. The siRNA molecule of claim 1, wherein said first sequence and said second sequence of said siRNA molecule each comprise about 21 nucleotides.

3. The siRNA molecule of claim 1, wherein said first sequence and said second sequence of said siRNA molecule each comprise about 19 nucleotides.

4. The siRNA molecule of claim 1, wherein said siRNA comprises a nucleotide overhang at the 3′-end, 5′-end, or both 3′ and 5′ ends of said siRNA.

5. The siRNA molecule of claim 1, wherein said siRNA does not comprise a nucleotide overhang.

6. The siRNA molecule of claim 1, wherein said siRNA molecule is chemically synthesized.

7. The siRNA molecule of claim 1, wherein said at least one nucleotide is a 2′-deoxy (2′-H) nucleotide.

8. The siRNA molecule of claim 1, wherein said at least one nucleotide is a 2′-deoxy--2′-fluoro (2′-F) nucleotide.

9. The siRNA molecule of claim 1, wherein said at least one nucleotide is a 2′-O-alkyl nucleotide.

10. The siRNA molecule of claim 9, wherein said 2′-O-alkyl nucleotide is a 2′-O-methyl nucleotide.

11. The siRNA molecule of claim 9, wherein said 2′-O-alkyl nucleotide is a 2′-O-allyl nucleotide.

12. The siRNA molecule of claim 1, wherein said siRNA molecule comprises at least one nucleic acid base modification.

13. The siRNA molecule of claim 1, wherein said siRNA molecule comprises at least one nucleic acid backbone modification.

14. The siRNA molecule of claim 1, wherein said siRNA molecule comprises at least one non-nucleotide.

15. The siRNA molecule of claim 14, wherein said non-nucleotide comprises an abasic moiety.

16. The siRNA molecule of claim 15, wherein said abasic moiety is present at the 3′-end, 5′-end, or both 3′ and 5′-ends of said first and/or said second sequence.

17. A composition comprising the siRNA of claim 1 in a pharmaceutically acceptable carrier or diluent.

The application's sequence listing, which the Patent Office published only in electronic form, follows.

SEQUENCE LISTING (6810 sequences)

SEQ ID NO: 1 - RNA, 17 nt, Homo sapiens
ccuaggcggcggccgcg

SEQ ID NO: 2 - RNA, 17 nt, Homo sapiens
aggcggcggccgcggcg

SEQ ID NO: 3 - RNA, 17 nt, Homo sapiens
cggcggccgcggcggcg

SEQ ID NO: 4 - RNA, 17 nt, Homo sapiens
cggccgcggcggcggag

SEQ ID NO: 5 - RNA, 17 nt, Homo sapiens
ccgcggcggcggaggca

SEQ ID NO: 6 - RNA, 17 nt, Homo sapiens
cggcggaggcagcagcg

SEQ ID NO: 7 - RNA, 17 nt, Homo sapiens
cggaggcagcagcggcg

SEQ ID NO: 8 - RNA, 17 nt, Homo sapiens
aggcagcagcggcggcg

SEQ ID NO: 9 - RNA, 17 nt, Homo sapiens
cagcagcggcggcggca

SEQ ID NO: 10 - RNA, 17 nt, Homo sapiens
cagcggcggcggcagug

SEQ ID NO: 11 - RNA, 17 nt, Homo sapiens
cggcggcggcaguggcg

SEQ ID NO: 12 - RNA, 17 nt, Homo sapiens
cggcggcaguggcggcg

SEQ ID NO: 13 - RNA, 17 nt, Homo sapiens
cggcaguggcggcggcg

SEQ ID NO: 14 - RNA, 17 nt, Homo sapiens
caguggcggcggcgaag

SEQ ID NO: 15 - RNA, 17 nt, Homo sapiens
uggcggcggcgaaggug

SEQ ID NO: 16 - RNA, 17 nt, Homo sapiens
cggcgaagguggcggcg

SEQ ID NO: 17 - RNA, 17 nt, Homo sapiens
cgaagguggcggcggcu

SEQ ID NO: 18 - RNA, 17 nt, Homo sapiens
agguggcggcggcucgg

SEQ ID NO: 19 - RNA, 17 nt, Homo sapiens
uggcggcggcucggcca

SEQ ID NO: 20 - RNA, 17 nt, Homo sapiens
gcggcucggccaguacu

SEQ ID NO: 21 - RNA, 17 nt, Homo sapiens
cucggccaguacucccg

SEQ ID NO: 22 - RNA, 17 nt, Homo sapiens
cggccaguacucccggc

SEQ ID NO: 23 - RNA, 17 nt, Homo sapiens
uacucccggcccccgcc

SEQ ID NO: 24 - RNA, 17 nt, Homo sapiens
cggcccccgccauuucg

SEQ ID NO: 25 - RNA, 17 nt, Homo sapiens
cccccgccauuucggac

SEQ ID NO: 26 - RNA, 17 nt, Homo sapiens
cauuucggacugggagc

SEQ ID NO: 27 - RNA, 17 nt, Homo sapiens
gacugggagcgagcgcg

SEQ ID NO: 28 - RNA, 17 nt, Homo sapiens
gggagcgagcgcggcgc

SEQ ID NO: 29 - RNA, 17 nt, Homo sapiens
gagcgagcgcggcgcag

SEQ ID NO: 30 - RNA, 17 nt, Homo sapiens
cgagcgcggcgcaggca

SEQ ID NO: 31 - RNA, 17 nt, Homo sapiens
agcgcggcgcaggcacu

SEQ ID NO: 32 - RNA, 17 nt, Homo sapiens
cggcgcaggcacugaag

SEQ ID NO: 33 - RNA, 17 nt, Homo sapiens
gcgcaggcacugaaggc

SEQ ID NO: 34 - RNA, 17 nt, Homo sapiens
cacugaaggcggcggcg

SEQ ID NO: 35 - RNA, 17 nt, Homo sapiens
ugaaggcggcggcgggg

SEQ ID NO: 36 - RNA, 17 nt, Homo sapiens
aggcggcggcggggcca

SEQ ID NO: 37 - RNA, 17 nt, Homo sapiens
gcggcggggccagaggc

SEQ ID NO: 38 - RNA, 17 nt, Homo sapiens
ggccagaggcucagcgg

SEQ ID NO: 39 - RNA, 17 nt, Homo sapiens
gaggcucagcggcuccc

SEQ ID NO: 40 - RNA, 17 nt, Homo sapiens
gcucagcggcucccagg

SEQ ID NO: 41 - RNA, 17 nt, Homo sapiens
gcucccaggugcgggag

SEQ ID NO: 42 - RNA, 17 nt, Homo sapiens
ucccaggugcgggagag

SEQ ID NO: 43 - RNA, 17 nt, Homo sapiens
ggagagaggccugcuga

SEQ ID NO: 44 - RNA, 17 nt, Homo sapiens
agaggccugcugaaaau

SEQ ID NO: 45 - RNA, 17 nt, Homo sapiens
ugcugaaaaugacugaa

SEQ ID NO: 46 - RNA, 17 nt, Homo sapiens
ugaaaaugacugaauau

SEQ ID NO: 47 - RNA, 17 nt, Homo sapiens
augacugaauauaaacu

SEQ ID NO: 48 - RNA, 17 nt, Homo sapiens
gacugaauauaaacuug

SEQ ID NO: 49 - RNA, 17 nt, Homo sapiens
gaauauaaacuuguggu

SEQ ID NO: 50 - RNA, 17 nt, Homo sapiens
auaaacuugugguaguu

SEQ ID NO: 51 - RNA, 17 nt, Homo sapiens
aacuugugguaguugga

SEQ ID NO: 52 - RNA, 17 nt, Homo sapiens
uugugguaguuggagcu

SEQ ID NO: 53 - RNA, 17 nt, Homo sapiens
uaguuggagcuuguggc

SEQ ID NO: 54 - RNA, 17 nt, Homo sapiens
uggagcuuguggcguag

SEQ ID NO: 55 - RNA, 17 nt, Homo sapiens
agcuuguggcguaggca

SEQ ID NO: 56 - RNA, 17 nt, Homo sapiens
cuuguggcguaggcaag

SEQ ID NO: 57 - RNA, 17 nt, Homo sapiens
uggcguaggcaagagug

SEQ ID NO: 58 - RNA, 17 nt, Homo sapiens
aggcaagagugccuuga

SEQ ID NO: 59 - RNA, 17 nt, Homo sapiens
gcaagagugccuugacg

SEQ ID NO: 60 - RNA, 17 nt, Homo sapiens
gugccuugacgauacag

SEQ ID NO: 61 - RNA, 17 nt, Homo sapiens
ccuugacgauacagcua

SEQ ID NO: 62 - RNA, 17 nt, Homo sapiens
uugacgauacagcuaau

SEQ ID NO: 63 - RNA, 17 nt, Homo sapiens
acgauacagcuaauuca

SEQ ID NO: 64 - RNA, 17 nt, Homo sapiens
uacagcuaauucagaau

SEQ ID NO: 65 - RNA, 17 nt, Homo sapiens
aauucagaaucauuuug

SEQ ID NO: 66 - RNA, 17 nt, Homo sapiens
ucagaaucauuuugugg

SEQ ID NO: 67 - RNA, 17 nt, Homo sapiens
aucauuuuguggacgaa

SEQ ID NO: 68 - RNA, 17 nt, Homo sapiens
uuuuguggacgaauaug

SEQ ID NO: 69 - RNA, 17 nt, Homo sapiens
guggacgaauaugaucc

SEQ ID NO: 70 - RNA, 17 nt, Homo sapiens
ggacgaauaugauccaa

SEQ ID NO: 71 - RNA, 17 nt, Homo sapiens
cgaauaugauccaacaa

SEQ ID NO: 72 - RNA, 17 nt, Homo sapiens
augauccaacaauagag

SEQ ID NO: 73 - RNA, 17 nt, Homo sapiens
auccaacaauagaggau

SEQ ID NO: 74 - RNA, 17 nt, Homo sapiens
aauagaggauuccuaca

SEQ ID NO: 75 - RNA, 17 nt, Homo sapiens
ggauuccuacaggaagc

SEQ ID NO: 76 - RNA, 17 nt, Homo sapiens
uacaggaagcaaguagu

SEQ ID NO: 77 - RNA, 17 nt, Homo sapiens
ggaagcaaguaguaauu

SEQ ID NO: 78 - RNA, 17 nt, Homo sapiens
agcaaguaguaauugau

SEQ ID NO: 79 - RNA, 17 nt, Homo sapiens
aaguaguaauugaugga

SEQ ID NO: 80 - RNA, 17 nt, Homo sapiens
aguaauugauggagaaa

SEQ ID NO: 81 - RNA, 17 nt, Homo sapiens
auggagaaaccugucuc

SEQ ID NO: 82 - RNA, 17 nt, Homo sapiens
agaaaccugucucuugg

SEQ ID NO: 83 - RNA, 17 nt, Homo sapiens
ucucuuggauauucucg

SEQ ID NO: 84 - RNA, 17 nt, Homo sapiens
ucuuggauauucucgac

SEQ ID NO: 85 - RNA, 17 nt, Homo sapiens
uauucucgacacagcag

SEQ ID NO: 86 - RNA, 17 nt, Homo sapiens
uucucgacacagcaggu

SEQ ID NO: 87 - RNA, 17 nt, Homo sapiens
ucgacacagcaggucaa

SEQ ID NO: 88 - RNA, 17 nt, Homo sapiens
cacagcaggucaagagg

SEQ ID NO: 89 - RNA, 17 nt, Homo sapiens
caagaggaguacagugc

SEQ ID NO: 90 - RNA, 17 nt, Homo sapiens
agaggaguacagugcaa

SEQ ID NO: 91 - RNA, 17 nt, Homo sapiens
ggaguacagugcaauga

SEQ ID NO: 92 - RNA, 17 nt, Homo sapiens
aguacagugcaaugagg

SEQ ID NO: 93 - RNA, 17 nt, Homo sapiens
acagugcaaugagggac

SEQ ID NO: 94 - RNA, 17 nt, Homo sapiens
aaugagggaccaguaca

SEQ ID NO: 95 - RNA, 17 nt, Homo sapiens
agggaccaguacaugag

SEQ ID NO: 96 - RNA, 17 nt, Homo sapiens
ggaccaguacaugagga

SEQ ID NO: 97 - RNA, 17 nt, Homo sapiens
accaguacaugaggacu

SEQ ID NO: 98 - RNA, 17 nt, Homo sapiens
acaugaggacuggggag

SEQ ID NO: 99 - RNA, 17 nt, Homo sapiens
uggggagggcuuucuuu

SEQ ID NO: 100 - RNA, 17 nt, Homo sapiens
cuuucuuuguguauuug

SEQ ID NO: 101 - RNA, 17 nt, Homo sapiens
uucuuuguguauuugcc

SEQ ID NO: 102 - RNA, 17 nt, Homo sapiens
cuuuguguauuugccau

SEQ ID NO: 103 - RNA, 17 nt, Homo sapiens
guguauuugccauaaau

SEQ ID NO: 104 - RNA, 17 nt, Homo sapiens
uauuugccauaaauaau

SEQ ID NO: 105 - RNA, 17 nt, Homo sapiens
ugccauaaauaauacua

SEQ ID NO: 106 - RNA, 17 nt, Homo sapiens
cauaaauaauacuaaau

SEQ ID NO: 107 - RNA, 17 nt, Homo sapiens
uaaauaauacuaaauca

SEQ ID NO: 108 - RNA, 17 nt, Homo sapiens
aauacuaaaucauuuga

SEQ ID NO: 109 - RNA, 17 nt, Homo sapiens
acuaaaucauuugaaga

SEQ ID NO: 110 - RNA, 17 nt, Homo sapiens
auuugaagauauucacc

SEQ ID NO: 111 - RNA, 17 nt, Homo sapiens
uugaagauauucaccau

SEQ ID NO: 112 - RNA, 17 nt, Homo sapiens
agauauucaccauuaua

SEQ ID NO: 113 - RNA, 17 nt, Homo sapiens
uauucaccauuauagag

SEQ ID NO: 114 - RNA, 17 nt, Homo sapiens
ucaccauuauagagaac

SEQ ID NO: 115 - RNA, 17 nt, Homo sapiens
uauagagaacaaauuaa

SEQ ID NO: 116 - RNA, 17 nt, Homo sapiens
gagaacaaauuaaaaga

SEQ ID NO: 117 - RNA, 17 nt, Homo sapiens
uuaaaagaguuaaggac

SEQ ID NO: 118 - RNA, 17 nt, Homo sapiens
aguuaaggacucugaag

SEQ ID NO: 119 - RNA, 17 nt, Homo sapiens
cucugaagauguaccua

SEQ ID NO: 120 - RNA, 17 nt, Homo sapiens
cugaagauguaccuaug

SEQ ID NO: 121 - RNA, 17 nt, Homo sapiens
gaagauguaccuauggu

SEQ ID NO: 122 - RNA, 17 nt, Homo sapiens
auguaccuaugguccua

SEQ ID NO: 123 - RNA, 17 nt, Homo sapiens
uaccuaugguccuagua

SEQ ID NO: 124 - RNA, 17 nt, Homo sapiens
ugguccuaguaggaaau

SEQ ID NO: 125 - RNA, 17 nt, Homo sapiens
aguaggaaauaaaugug

SEQ ID NO: 126 - RNA, 17 nt, Homo sapiens
ggaaauaaaugugauuu

SEQ ID NO: 127 - RNA, 17 nt, Homo sapiens
aaauaaaugugauuugc

SEQ ID NO: 128 - RNA, 17 nt, Homo sapiens
uaaaugugauuugccuu

SEQ ID NO: 129 - RNA, 17 nt, Homo sapiens
ugugauuugccuucuag

SEQ ID NO: 130 - RNA, 17 nt, Homo sapiens
cuucuagaacaguagac

SEQ ID NO: 131 - RNA, 17 nt, Homo sapiens
cuagaacaguagacaca

SEQ ID NO: 132 - RNA, 17 nt, Homo sapiens
aacaguagacacaaaac

SEQ ID NO: 133 - RNA, 17 nt, Homo sapiens
caguagacacaaaacag

SEQ ID NO: 134 - RNA, 17 nt, Homo sapiens
gacacaaaacaggcuca

SEQ ID NO: 135 - RNA, 17 nt, Homo sapiens
caaaacaggcucaggac

SEQ ID NO: 136 - RNA, 17 nt, Homo sapiens
ggcucaggacuuagcaa

SEQ ID NO: 137 - RNA, 17 nt, Homo sapiens
aggacuuagcaagaagu

SEQ ID NO: 138 - RNA, 17 nt, Homo sapiens
agcaagaaguuauggaa

SEQ ID NO: 139 - RNA, 17 nt, Homo sapiens
aagaaguuauggaauuc

SEQ ID NO: 140 - RNA, 17 nt, Homo sapiens
guuauggaauuccuuuu

SEQ ID NO: 141 - RNA, 17 nt, Homo sapiens
uuccuuuuauugaaaca

SEQ ID NO: 142 - RNA, 17 nt, Homo sapiens
uuauugaaacaucagca

SEQ ID NO: 143 - RNA, 17 nt, Homo sapiens
auugaaacaucagcaaa

SEQ ID NO: 144 - RNA, 17 nt, Homo sapiens
aaacaucagcaaagaca

SEQ ID NO: 145 - RNA, 17 nt, Homo sapiens
cagcaaagacaagacag

SEQ ID NO: 146 - RNA, 17 nt, Homo sapiens
aagacaagacagggugu

SEQ ID NO: 147 - RNA, 17 nt, Homo sapiens
aagacaggguguugaug

SEQ ID NO: 148 - RNA, 17 nt, Homo sapiens
gacaggguguugaugau

SEQ ID NO: 149 - RNA, 17 nt, Homo sapiens
ggguguugaugaugccu

SEQ ID NO: 150 - RNA, 17 nt, Homo sapiens
uguugaugaugccuucu

SEQ ID NO: 151 - RNA, 17 nt, Homo sapiens
uugaugaugccuucuau

SEQ ID NO: 152 - RNA, 17 nt, Homo sapiens
ugccuucuauacauuag

SEQ ID NO: 153 - RNA, 17 nt, Homo sapiens
ccuucuauacauuaguu

SEQ ID NO: 154 - RNA, 17 nt, Homo sapiens
uucuauacauuaguucg

SEQ ID NO: 155 - RNA, 17 nt, Homo sapiens
auacauuaguucgagaa

SEQ ID NO: 156 - RNA, 17 nt, Homo sapiens
uucgagaaauucgaaaa

SEQ ID NO: 157 - RNA, 17 nt, Homo sapiens
auucgaaaacauaaaga

SEQ ID NO: 158 - RNA, 17 nt, Homo sapiens
ucgaaaacauaaagaaa

SEQ ID NO: 159 - RNA, 17 nt, Homo sapiens
aagaaaagaugagcaaa

SEQ ID NO: 160 - RNA, 17 nt, Homo sapiens
aaagaugagcaaagaug

SEQ ID NO: 161 - RNA, 17 nt, Homo sapiens
gagcaaagaugguaaaa

SEQ ID NO: 162 - RNA, 17 nt, Homo sapiens
caaagaugguaaaaaga

SEQ ID NO: 163 - RNA, 17 nt, Homo sapiens
aaaaagaagucaaagac

SEQ ID NO: 164 - RNA, 17 nt, Homo sapiens
agucaaagacaaagugu

SEQ ID NO: 165 - RNA, 17 nt, Homo sapiens
aagacaaaguguguaau

SEQ ID NO: 166 - RNA, 17 nt, Homo sapiens
gacaaaguguguaauua

SEQ ID NO: 167 - RNA, 17 nt, Homo sapiens
caaaguguguaauuaug

SEQ ID NO: 168 - RNA, 17 nt, Homo sapiens
aguguguaauuauguaa

SEQ ID NO: 169 - RNA, 17 nt, Homo sapiens
guguaauuauguaaaua

SEQ ID NO: 170 - RNA, 17 nt, Homo sapiens
guaauuauguaaauaca

SEQ ID NO: 171 - RNA, 17 nt, Homo sapiens
uuauguaaauacaauuu

SEQ ID NO: 172 - RNA, 17 nt, Homo sapiens
auguaaauacaauuugu

SEQ ID NO: 173 - RNA, 17 nt, Homo sapiens
uaaauacaauuuguacu

SEQ ID NO: 174 - RNA, 17 nt, Homo sapiens
uacaauuuguacuuuuu

SEQ ID NO: 175 - RNA, 17 nt, Homo sapiens
caauuuguacuuuuuuc

SEQ ID NO: 176 - RNA, 17 nt, Homo sapiens
uucuuaaggcauacuag

SEQ ID NO: 177 - RNA, 17 nt, Homo sapiens
cuuaaggcauacuagua

SEQ ID NO: 178 - RNA, 17 nt, Homo sapiens
uaaggcauacuaguaca

SEQ ID NO: 179 - RNA, 17 nt, Homo sapiens
gcauacuaguacaagug

SEQ ID NO: 180 - RNA, 17 nt, Homo sapiens
auacuaguacaaguggu

SEQ ID NO: 181 - RNA, 17 nt, Homo sapiens
uaguacaagugguaauu

SEQ ID NO: 182 - RNA, 17 nt, Homo sapiens
uacaagugguaauuuuu

SEQ ID NO: 183 - RNA, 17 nt, Homo sapiens
aagugguaauuuuugua

SEQ ID NO: 184 - RNA, 17 nt, Homo sapiens
uaauuuuuguacauuac

SEQ ID NO: 185 - RNA, 17 nt, Homo sapiens
auuuuuguacauuacac

SEQ ID NO: 186 - RNA, 17 nt, Homo sapiens
uuuuguacauuacacua

SEQ ID NO: 187 - RNA, 17 nt, Homo sapiens
uguacauuacacuaaau

SEQ ID NO: 188 - RNA, 17 nt, Homo sapiens
uacauuacacuaaauua

SEQ ID NO: 189 - RNA, 17 nt, Homo sapiens
uacacuaaauuauuagc

SEQ ID NO: 190 - RNA, 17 nt, Homo sapiens
acuaaauuauuagcauu

SEQ ID NO: 191 - RNA, 17 nt, Homo sapiens
aauuauuagcauuuguu

SEQ ID NO: 192 - RNA, 17 nt, Homo sapiens
uuauuagcauuuguuuu

SEQ ID NO: 193 - RNA, 17 nt, Homo sapiens
uagcauuuguuuuagca

SEQ ID NO: 194 - RNA, 17 nt, Homo sapiens
uuguuuuagcauuaccu

SEQ ID NO: 195 - RNA, 17 nt, Homo sapiens
guuuuagcauuaccuaa

SEQ ID NO: 196 - RNA, 17 nt, Homo sapiens
uuagcauuaccuaauuu

SEQ ID NO: 197 - RNA, 17 nt, Homo sapiens
auuaccuaauuuuuuuc

SEQ ID NO: 198 - RNA, 17 nt, Homo sapiens
uuuuuccugcuccaugc

SEQ ID NO: 199 - RNA, 17 nt, Homo sapiens
ccugcuccaugcagacu

SEQ ID NO: 200 - RNA, 17 nt, Homo sapiens
ugcuccaugcagacugu

SEQ ID NO: 201 - RNA, 17 nt, Homo sapiens
ccaugcagacuguuagc

SEQ ID NO: 202 - RNA, 17 nt, Homo sapiens
ugcagacuguuagcuuu

SEQ ID NO: 203 - RNA, 17 nt, Homo sapiens
gacuguuagcuuuuacc

SEQ ID NO: 204 - RNA, 17 nt, Homo sapiens
uagcuuuuaccuuaaau

SEQ ID NO: 205 - RNA, 17 nt, Homo sapiens
uaccuuaaaugcuuauu

SEQ ID NO: 206 - RNA, 17 nt, Homo sapiens
ccuuaaaugcuuauuuu

SEQ ID NO: 207 - RNA, 17 nt, Homo sapiens
aaaugcuuauuuuaaaa

SEQ ID NO: 208 - RNA, 17 nt, Homo sapiens
auuuuaaaaugacagug

SEQ ID NO: 209 - RNA, 17 nt, Homo sapiens
uuaaaaugacaguggaa

SEQ ID NO: 210 - RNA, 17 nt, Homo sapiens
aaaugacaguggaaguu

SEQ ID NO: 211 - RNA, 17 nt, Homo sapiens
caguggaaguuuuuuuu

SEQ ID NO: 212 - RNA, 17 nt, Homo sapiens
uccucgaagugccagua

SEQ ID NO: 213 - RNA, 17 nt, Homo sapiens
cucgaagugccaguauu

SEQ ID NO: 214 - RNA, 17 nt, Homo sapiens
aagugccaguauuccca

SEQ ID NO: 215 - RNA, 17 nt, Homo sapiens
gugccaguauucccaga

SEQ ID NO: 216 - RNA, 17 nt, Homo sapiens
uucccagaguuuugguu

SEQ ID NO: 217 - RNA, 17 nt, Homo sapiens
gaguuuugguuuuugaa

SEQ ID NO: 218 - RNA, 17 nt, Homo sapiens
guuuuugaacuagcaau

SEQ ID NO: 219 - RNA, 17 nt, Homo sapiens
uugaacuagcaaugccu

SEQ ID NO: 220 - RNA, 17 nt, Homo sapiens
aacuagcaaugccugug

SEQ ID NO: 221 - RNA, 17 nt, Homo sapiens
cuagcaaugccugugaa

SEQ ID NO: 222 - RNA, 17 nt, Homo sapiens
caaugccugugaaaaag

SEQ ID NO: 223 - RNA, 17 nt, Homo sapiens
aaaaagaaacugaauac

SEQ ID NO: 224 - RNA, 17 nt, Homo sapiens
gaaacugaauaccuaag

SEQ ID NO: 225 - RNA, 17 nt, Homo sapiens
aacugaauaccuaagau

SEQ ID NO: 226 - RNA, 17 nt, Homo sapiens
uaccuaagauuucuguc

SEQ ID NO: 227 - RNA, 17 nt, Homo sapiens
agauuucugucuugggg

SEQ ID NO: 228 - RNA, 17 nt, Homo sapiens
gucuugggguuuuuggu

SEQ ID NO: 229 - RNA, 17 nt, Homo sapiens
gguuuuuggugcaugca

SEQ ID NO: 230 - RNA, 17 nt, Homo sapiens
uuuuuggugcaugcagu

SEQ ID NO: 231 - RNA, 17 nt, Homo sapiens
uuuggugcaugcaguug

SEQ ID NO: 232 - RNA, 17 nt, Homo sapiens
uggugcaugcaguugau

SEQ ID NO: 233 - RNA, 17 nt, Homo sapiens
ugcaugcaguugauuac

SEQ ID NO: 234 - RNA, 17 nt, Homo sapiens
ugcaguugauuacuucu

SEQ ID NO: 235 - RNA, 17 nt, Homo sapiens
aguugauuacuucuuau

SEQ ID NO: 236 - RNA, 17 nt, Homo sapiens
uacuucuuauuuuucuu

SEQ ID NO: 237 - RNA, 17 nt, Homo sapiens
uuuuucuuaccaagugu

SEQ ID NO: 238 - RNA, 17 nt, Homo sapiens
cuuaccaagugugaaug

SEQ ID NO: 239 - RNA, 17 nt, Homo sapiens
uaccaagugugaauguu

SEQ ID NO: 240 - RNA, 17 nt, Homo sapiens
aagugugaauguuggug

SEQ ID NO: 241 - RNA, 17 nt, Homo sapiens
gugugaauguuggugug

SEQ ID NO: 242 - RNA, 17 nt, Homo sapiens
gaauguuggugugaaac

SEQ ID NO: 243 - RNA, 17 nt, Homo sapiens
auguuggugugaaacaa

SEQ ID NO: 244 - RNA, 17 nt, Homo sapiens
ggugugaaacaaauuaa

SEQ ID NO: 245 - RNA, 17 nt, Homo sapiens
ugaaacaaauuaaugaa

SEQ ID NO: 246 - RNA, 17 nt, Homo sapiens
acaaauuaaugaagcuu

SEQ ID NO: 247 - RNA, 17 nt, Homo sapiens
uuaaugaagcuuuugaa

SEQ ID NO: 248 - RNA, 17 nt, Homo sapiens
gcuuuugaaucaucccu

SEQ ID NO: 249 - RNA, 17 nt, Homo sapiens
uuugaaucaucccuauu

SEQ ID NO: 250 - RNA, 17 nt, Homo sapiens
ucaucccuauucugugu

SEQ ID NO: 251 - RNA, 17 nt, Homo sapiens
ccuauucuguguuuuau

SEQ ID NO: 252 - RNA, 17 nt, Homo sapiens
uauucuguguuuuaucu

SEQ ID NO: 253 - RNA, 17 nt, Homo sapiens
uguguuuuaucuaguca

SEQ ID NO: 254 - RNA, 17 nt, Homo sapiens
uuuaucuagucacauaa

SEQ ID NO: 255 - RNA, 17 nt, Homo sapiens
aucuagucacauaaaug

SEQ ID NO: 256 - RNA, 17 nt, Homo sapiens
cuagucacauaaaugga

SEQ ID NO: 257 - RNA, 17 nt, Homo sapiens
ucacauaaauggauuaa

SEQ ID NO: 258 - RNA, 17 nt, Homo sapiens
auaaauggauuaauuac

SEQ ID NO: 259 - RNA, 17 nt, Homo sapiens
auggauuaauuacuaau

SEQ ID NO: 260 - RNA, 17 nt, Homo sapiens
gauuaauuacuaauuuc

SEQ ID NO: 261 - RNA, 17 nt, Homo sapiens
aauuacuaauuucaguu

SEQ ID NO: 262 - RNA, 17 nt, Homo sapiens
uaauuucaguugagacc

SEQ ID NO: 263 - RNA, 17 nt, Homo sapiens
caguugagaccuucuaa

SEQ ID NO: 264 - RNA, 17 nt, Homo sapiens
accuucuaauugguuuu

SEQ ID NO: 265 - RNA, 17 nt, Homo sapiens
ucuaauugguuuuuacu

SEQ ID NO: 266 - RNA, 17 nt, Homo sapiens
ugguuuuuacugaaaca

SEQ ID NO: 267 - RNA, 17 nt, Homo sapiens
uuacugaaacauugagg

SEQ ID NO: 268 - RNA, 17 nt, Homo sapiens
acugaaacauugaggga

SEQ ID NO: 269 - RNA, 17 nt, Homo sapiens
auugagggacacaaauu

SEQ ID NO: 270 - RNA, 17 nt, Homo sapiens
ugagggacacaaauuua

SEQ ID NO: 271 - RNA, 17 nt, Homo sapiens
ggacacaaauuuauggg

SEQ ID NO: 272 - RNA, 17 nt, Homo sapiens
acaaauuuaugggcuuc

SEQ ID NO: 273 - RNA, 17 nt, Homo sapiens
auuuaugggcuuccuga

SEQ ID NO: 274 - RNA, 17 nt, Homo sapiens
gcuuccugaugaugauu

SEQ ID NO: 275 - RNA, 17 nt, Homo sapiens
uccugaugaugauucuu

SEQ ID NO: 276 - RNA, 17 nt, Homo sapiens
ugaugaugauucuucua

SEQ ID NO: 277 - RNA, 17 nt, Homo sapiens
ucuucuaggcaucaugu

SEQ ID NO: 278 - RNA, 17 nt, Homo sapiens
uucuaggcaucaugucc

SEQ ID NO: 279 - RNA, 17 nt, Homo sapiens
uaggcaucauguccuau

SEQ ID NO: 280 - RNA, 17 nt, Homo sapiens
ggcaucauguccuauag

SEQ ID NO: 281 - RNA, 17 nt, Homo sapiens
cauguccuauaguuugu

SEQ ID NO: 282 - RNA, 17 nt, Homo sapiens
guccuauaguuugucau

SEQ ID NO: 283 - RNA, 17 nt, Homo sapiens
uauaguuugucaucccu

SEQ ID NO: 284 - RNA, 17 nt, Homo sapiens
aguuugucaucccugau

SEQ ID NO: 285 - RNA, 17 nt, Homo sapiens
caucccugaugaaugua

SEQ ID NO: 286 - RNA, 17 nt, Homo sapiens
ccugaugaauguaaagu

SEQ ID NO: 287 - RNA, 17 nt, Homo sapiens
ugaugaauguaaaguua

SEQ ID NO: 288 - RNA, 17 nt, Homo sapiens
aauguaaaguuacacug

SEQ ID NO: 289 - RNA, 17 nt, Homo sapiens
guaaaguuacacuguuc

SEQ ID NO: 290 - RNA, 17 nt, Homo sapiens
aaaguuacacuguucac

SEQ ID NO: 291 - RNA, 17 nt, Homo sapiens
guuacacuguucacaaa

SEQ ID NO: 292 - RNA, 17 nt, Homo sapiens
cacuguucacaaagguu

SEQ ID NO: 293 - RNA, 17 nt, Homo sapiens
ucacaaagguuuugucu

SEQ ID NO: 294 - RNA, 17 nt, Homo sapiens
aagguuuugucuccuuu

SEQ ID NO: 295 - RNA, 17 nt, Homo sapiens
uccuuuccacugcuauu

SEQ ID NO: 296 - RNA, 17 nt, Homo sapiens
uuuccacugcuauuagu

SEQ ID NO: 297 - RNA, 17 nt, Homo sapiens
ccacugcuauuagucau

SEQ ID NO: 298 - RNA, 17 nt, Homo sapiens
ugcuauuagucaugguc

SEQ ID NO: 299 - RNA, 17 nt, Homo sapiens
uauuagucauggucacu

SEQ ID NO: 300 - RNA, 17 nt, Homo sapiens
uagucauggucacucuc

SEQ ID NO: 301 - RNA, 17 nt, Homo sapiens
ucauggucacucucccc

SEQ ID NO: 302 - RNA, 17 nt, Homo sapiens
uccccaaaauauuauau

SEQ ID NO: 303 - RNA, 17 nt, Homo sapiens
cccaaaauauuauauuu

SEQ ID NO: 304 - RNA, 17 nt, Homo sapiens
aaaauauuauauuuuuu

SEQ ID NO: 305 - RNA, 17 nt, Homo sapiens
aauauuauauuuuuucu

SEQ ID NO: 306 - RNA, 17 nt, Homo sapiens
uuuuuucuauaaaaaga

SEQ ID NO: 307 - RNA, 17 nt, Homo sapiens
agaaaaaaauggaaaaa

SEQ ID NO: 308 - RNA, 17 nt, Homo sapiens
ggaaaaaaauuacaagg

SEQ ID NO: 309 - RNA, 17 nt, Homo sapiens
aaaaaauuacaaggcaa

SEQ ID NO: 310 - RNA, 17 nt, Homo sapiens
auuacaaggcaauggaa

SEQ ID NO: 311 - RNA, 17 nt, Homo sapiens
acaaggcaauggaaacu

SEQ ID NO: 312 - RNA, 17 nt, Homo sapiens
caauggaaacuauuaua

SEQ ID NO: 313 - RNA, 17 nt, Homo sapiens
uggaaacuauuauaagg

SEQ ID NO: 314 - RNA, 17 nt, Homo sapiens
aaacuauuauaaggcca

SEQ ID NO: 315 - RNA, 17 nt, Homo sapiens
auuauaaggccauuucc

SEQ ID NO: 316 - RNA, 17 nt, Homo sapiens
auaaggccauuuccuuu

SEQ ID NO: 317 - RNA, 17 nt, Homo sapiens
uccuuuucacauuagau

SEQ ID NO: 318 - RNA, 17 nt, Homo sapiens
cuuuucacauuagauaa

SEQ ID NO: 319 - RNA, 17 nt, Homo sapiens
cacauuagauaaauuac

SEQ ID NO: 320 - RNA, 17 nt, Homo sapiens
uuagauaaauuacuaua

SEQ ID NO: 321 - RNA, 17 nt, Homo sapiens
gauaaauuacuauaaag

SEQ ID NO: 322 - RNA, 17 nt, Homo sapiens
aaauuacuauaaagacu

SEQ ID NO: 323 - RNA, 17 nt, Homo sapiens
cuauaaagacuccuaau

SEQ ID NO: 324 - RNA, 17 nt, Homo sapiens
gacuccuaauagcuuuu

SEQ ID NO: 325 - RNA, 17 nt, Homo sapiens
uccuaauagcuuuuucc

SEQ ID NO: 326 - RNA, 17 nt, Homo sapiens
uuuuuccuguuaaggca

SEQ ID NO: 327 - RNA, 17 nt, Homo sapiens
cuguuaaggcagaccca

SEQ ID NO: 328 - RNA, 17 nt, Homo sapiens
uaaggcagacccaguau

SEQ ID NO: 329 - RNA, 17 nt, Homo sapiens
cagacccaguaugaaug

SEQ ID NO: 330 - RNA, 17 nt, Homo sapiens
gacccaguaugaauggg

SEQ ID NO: 331 - RNA, 17 nt, Homo sapiens
caguaugaaugggauua

SEQ ID NO: 332 - RNA, 17 nt, Homo sapiens
ugaaugggauuauuaua

SEQ ID NO: 333 - RNA, 17 nt, Homo sapiens
augggauuauuauagca

SEQ ID NO: 334 - RNA, 17 nt, Homo sapiens
ggauuauuauagcaacc

SEQ ID NO: 335 - RNA, 17 nt, Homo sapiens
uuauuauagcaaccauu

SEQ ID NO: 336 - RNA, 17 nt, Homo sapiens
uuauagcaaccauuuug

SEQ ID NO: 337 - RNA, 17 nt, Homo sapiens
uagcaaccauuuugggg

SEQ ID NO: 338 - RNA, 17 nt, Homo sapiens
auuuuggggcuauauuu

SEQ ID NO: 339 - RNA, 17 nt, Homo sapiens
uuggggcuauauuuaca

SEQ ID NO: 340 - RNA, 17 nt, Homo sapiens
ggggcuauauuuacaug

SEQ ID NO: 341 - RNA, 17 nt, Homo sapiens
cuauauuuacaugcuac

SEQ ID NO: 342 - RNA, 17 nt, Homo sapiens
auauuuacaugcuacua

SEQ ID NO: 343 - RNA, 17 nt, Homo sapiens
auuuacaugcuacuaaa

SEQ ID NO: 344 - RNA, 17 nt, Homo sapiens
uacaugcuacuaaauuu

SEQ ID NO: 345 - RNA, 17 nt, Homo sapiens
gcuacuaaauuuuuaua

SEQ ID NO: 346 - RNA, 17 nt, Homo sapiens
aaauuuuuauaauaauu

SEQ ID NO: 347 - RNA, 17 nt, Homo sapiens
uuuuuauaauaauugaa

SEQ ID NO: 348 - RNA, 17 nt, Homo sapiens
uuauaauaauugaaaag

SEQ ID NO: 349 - RNA, 17 nt, Homo sapiens
uugaaaagauuuuaaca

SEQ ID NO: 350 - RNA, 17 nt, Homo sapiens
agauuuuaacaaguaua

SEQ ID NO: 351 - RNA, 17 nt, Homo sapiens
uuuaacaaguauaaaaa

SEQ ID NO: 352 - RNA, 17 nt, Homo sapiens
uaacaaguauaaaaaaa

SEQ ID NO: 353 - RNA, 17 nt, Homo sapiens
auaaaaaaauucucaua

SEQ ID NO: 354 - RNA, 17 nt, Homo sapiens
aaauucucauaggaauu

SEQ ID NO: 355 - RNA, 17 nt, Homo sapiens
ucauaggaauuaaaugu

SEQ ID NO: 356 - RNA, 17 nt, Homo sapiens
ggaauuaaauguagucu

SEQ ID NO: 357 - RNA, 17 nt, Homo sapiens
aauuaaauguagucucc

SEQ ID NO: 358 - RNA, 17 nt, Homo sapiens
uaaauguagucucccug

SEQ ID NO: 359 - RNA, 17 nt, Homo sapiens
gucucccugugucagac

SEQ ID NO: 360 - RNA, 17 nt, Homo sapiens
cucccugugucagacug

SEQ ID NO: 361 - RNA, 17 nt, Homo sapiens
ugugucagacugcucuu

SEQ ID NO: 362 - RNA, 17 nt, Homo sapiens
gucagacugcucuuuca

SEQ ID NO: 363 - RNA, 17 nt, Homo sapiens
gcucuuucauaguauaa

SEQ ID NO: 364 - RNA, 17 nt, Homo sapiens
cuuucauaguauaacuu

SEQ ID NO: 365 - RNA, 17 nt, Homo sapiens
uucauaguauaacuuua

SEQ ID NO: 366 - RNA, 17 nt, Homo sapiens
auaguauaacuuuaaau

SEQ ID NO: 367 - RNA, 17 nt, Homo sapiens
aacuuuaaaucuuuucu

SEQ ID NO: 368 - RNA, 17 nt, Homo sapiens
uuucuucaacuugaguc

SEQ ID NO: 369 - RNA, 17 nt, Homo sapiens
caacuugagucuuugaa

SEQ ID NO: 370 - RNA, 17 nt, Homo sapiens
cuuugaagauaguuuua

SEQ ID NO: 371 - RNA, 17 nt, Homo sapiens
ugaagauaguuuuaauu

SEQ ID NO: 372 - RNA, 17 nt, Homo sapiens
uaguuuuaauucugcuu

SEQ ID NO: 373 - RNA, 17 nt, Homo sapiens
uuaauucugcuugugac

SEQ ID NO: 374 - RNA, 17 nt, Homo sapiens
uucugcuugugacauua

SEQ ID NO: 375 - RNA, 17 nt, Homo sapiens
ugcuugugacauuaaaa

SEQ ID NO: 376 - RNA, 17 nt, Homo sapiens
cuugugacauuaaaaga

SEQ ID NO: 377 - RNA, 17 nt, Homo sapiens
auuaaaagauuauuugg

SEQ ID NO: 378 - RNA, 17 nt, Homo sapiens
aaaagauuauuugggcc

SEQ ID NO: 379 - RNA, 17 nt, Homo sapiens
uuauuugggccaguuau

SEQ ID NO: 380 - RNA, 17 nt, Homo sapiens
uugggccaguuauagcu

SEQ ID NO: 381 - RNA, 17 nt, Homo sapiens
ggccaguuauagcuuau

SEQ ID NO: 382 - RNA, 17 nt, Homo sapiens
caguuauagcuuauuag

SEQ ID NO: 383 - RNA, 17 nt, Homo sapiens
uauagcuuauuaggugu

SEQ ID NO: 384 - RNA, 17 nt, Homo sapiens
cuuauuagguguugaag

SEQ ID NO: 385 - RNA, 17 nt, Homo sapiens
uauuagguguugaagag

SEQ ID NO: 386 - RNA, 17 nt, Homo sapiens
uugaagagaccaagguu

SEQ ID NO: 387 - RNA, 17 nt, Homo sapiens
agaccaagguugcaagc

SEQ ID NO: 388 - RNA, 17 nt, Homo sapiens
ccaagguugcaagccag

SEQ ID NO: 389 - RNA, 17 nt, Homo sapiens
gguugcaagccaggccc

SEQ ID NO: 390 - RNA, 17 nt, Homo sapiens
caagccaggcccugugu

SEQ ID NO: 391 - RNA, 17 nt, Homo sapiens
caggcccugugugaacc

SEQ ID NO: 392 - RNA, 17 nt, Homo sapiens
ggcccugugugaaccuu

SEQ ID NO: 393 - RNA, 17 nt, Homo sapiens
cugugugaaccuugagc

SEQ ID NO: 394 - RNA, 17 nt, Homo sapiens
aaccuugagcuuucaua

SEQ ID NO: 395 - RNA, 17 nt, Homo sapiens
gagcuuucauagagagu

SEQ ID NO: 396 - RNA, 17 nt, Homo sapiens
cauagagaguuucacag

SEQ ID NO: 397 - RNA, 17 nt, Homo sapiens
agaguuucacagcaugg

SEQ ID NO: 398 - RNA, 17 nt, Homo sapiens
guuucacagcauggacu

SEQ ID NO: 399 - RNA, 17 nt, Homo sapiens
uucacagcauggacugu

SEQ ID NO: 400 - RNA, 17 nt, Homo sapiens
cagcauggacugugugc

SEQ ID NO: 401 - RNA, 17 nt, Homo sapiens
cauggacugugugcccc

SEQ ID NO: 402 - RNA, 17 nt, Homo sapiens
uggacugugugccccac

SEQ ID NO: 403 - RNA, 17 nt, Homo sapiens
gacugugugccccacgg

SEQ ID NO: 404 - RNA, 17 nt, Homo sapiens
ugugccccacggucauc

SEQ ID NO: 405 - RNA, 17 nt, Homo sapiens
gccccacggucauccga

SEQ ID NO: 406 - RNA, 17 nt, Homo sapiens
ccacggucauccgagug

SEQ ID NO: 407 - RNA, 17 nt, Homo sapiens
ucauccgagugguugua

SEQ ID NO: 408 - RNA, 17 nt, Homo sapiens
uccgagugguuguacga

SEQ ID NO: 409 - RNA, 17 nt, Homo sapiens
gagugguuguacgaugc

SEQ ID NO: 410 - RNA, 17 nt, Homo sapiens
gugguuguacgaugcau

SEQ ID NO: 411 - RNA, 17 nt, Homo sapiens
guuguacgaugcauugg

SEQ ID NO: 412 - RNA, 17 nt, Homo sapiens
uguacgaugcauugguu

SEQ ID NO: 413 - RNA, 17 nt, Homo sapiens
uacgaugcauugguuag

SEQ ID NO: 414 - RNA, 17 nt, Homo sapiens
augcauugguuagucaa

SEQ ID NO: 415 - RNA, 17 nt, Homo sapiens
auugguuagucaaaaau

SEQ ID NO: 416 - RNA, 17 nt, Homo sapiens
agucaaaaauggggagg

SEQ ID NO: 417 - RNA, 17 nt, Homo sapiens
ggggagggacuagggca

SEQ ID NO: 418 - RNA, 17 nt, Homo sapiens
ggacuagggcaguuugg

SEQ ID NO: 419 - RNA, 17 nt, Homo sapiens
cuagggcaguuuggaua

SEQ ID NO: 420 - RNA, 17 nt, Homo sapiens
caguuuggauagcucaa

SEQ ID NO: 421 - RNA, 17 nt, Homo sapiens
uuuggauagcucaacaa

SEQ ID NO: 422 - RNA, 17 nt, Homo sapiens
auagcucaacaagauac

SEQ ID NO: 423 - RNA, 17 nt, Homo sapiens
ucaacaagauacaaucu

SEQ ID NO: 424 - RNA, 17 nt, Homo sapiens
aacaagauacaaucuca

SEQ ID NO: 425 - RNA, 17 nt, Homo sapiens
aagauacaaucucacuc

SEQ ID NO: 426 - RNA, 17 nt, Homo sapiens
acaaucucacucugugg

SEQ ID NO: 427 - RNA, 17 nt, Homo sapiens
cucacucuguggugguc

SEQ ID NO: 428 - RNA, 17 nt, Homo sapiens
acucuguggugguccug

SEQ ID NO: 429 - RNA, 17 nt, Homo sapiens
cuguggugguccugcug

SEQ ID NO: 430 - RNA, 17 nt, Homo sapiens
gugguccugcugacaaa

SEQ ID NO: 431 - RNA, 17 nt, Homo sapiens
uccugcugacaaaucaa

SEQ ID NO: 432 - RNA, 17 nt, Homo sapiens
gcugacaaaucaagagc

SEQ ID NO: 433 - RNA, 17 nt, Homo sapiens
aaucaagagcauugcuu

SEQ ID NO: 434 - RNA, 17 nt, Homo sapiens
ucaagagcauugcuuuu

SEQ ID NO: 435 - RNA, 17 nt, Homo sapiens
agagcauugcuuuuguu

SEQ ID NO: 436 - RNA, 17 nt, Homo sapiens
uugcuuuuguuucuuaa

SEQ ID NO: 437 - RNA, 17 nt, Homo sapiens
uuaagaaaacaaacucu

SEQ ID NO: 438 - RNA, 17 nt, Homo sapiens
gaaaacaaacucuuuuu

SEQ ID NO: 439 - RNA, 17 nt, Homo sapiens
uuuuaaaaauuacuuuu

SEQ ID NO: 440 - RNA, 17 nt, Homo sapiens
uaaaaauuacuuuuaaa

SEQ ID NO: 441 - RNA, 17 nt, Homo sapiens
acuuuuaaauauuaacu

SEQ ID NO: 442 - RNA, 17 nt, Homo sapiens
uuuuaaauauuaacuca

SEQ ID NO: 443 - RNA, 17 nt, Homo sapiens
aaauauuaacucaaaag

SEQ ID NO: 444 - RNA, 17 nt, Homo sapiens
acucaaaaguugagauu

SEQ ID NO: 445 - RNA, 17 nt, Homo sapiens
aaguugagauuuugggg

SEQ ID NO: 446 - RNA, 17 nt, Homo sapiens
auuuuggggugguggug

SEQ ID NO: 447 - RNA, 17 nt, Homo sapiens
uuggggugguggugugc

SEQ ID NO: 448 - RNA, 17 nt, Homo sapiens
gggugguggugugccaa

SEQ ID NO: 449 - RNA, 17 nt, Homo sapiens
gugguggugugccaaga

SEQ ID NO: 450 - RNA, 17 nt, Homo sapiens
gguggugugccaagaca

SEQ ID NO: 451 - RNA, 17 nt, Homo sapiens
gugccaagacauuaauu

SEQ ID NO: 452 - RNA, 17 nt, Homo sapiens
gccaagacauuaauuuu

SEQ ID NO: 453 - RNA, 17 nt, Homo sapiens
agacauuaauuuuuuuu

SEQ ID NO: 454 - RNA, 17 nt, Homo sapiens
uuuuuuaaacaaugaag

SEQ ID NO: 455 - RNA, 17 nt, Homo sapiens
uuuaaacaaugaaguga

SEQ ID NO: 456 - RNA, 17 nt, Homo sapiens
acaaugaagugaaaaag

SEQ ID NO: 457 - RNA, 17 nt, Homo sapiens
gugaaaaaguuuuacaa

SEQ ID NO: 458 - RNA, 17 nt, Homo sapiens
aaaguuuuacaaucucu

SEQ ID NO: 459 - RNA, 17 nt, Homo sapiens
guuuuacaaucucuagg

SEQ ID NO: 460 - RNA, 17 nt, Homo sapiens
aucucuagguuuggcua

SEQ ID NO: 461 - RNA, 17 nt, Homo sapiens
uagguuuggcuaguucu

SEQ ID NO: 462 - RNA, 17 nt, Homo sapiens
uuuggcuaguucucuua

SEQ ID NO: 463 - RNA, 17 nt, Homo sapiens
uucucuuaacacugguu

SEQ ID NO: 464 - RNA, 17 nt, Homo sapiens
cucuuaacacugguuaa

SEQ ID NO: 465 - RNA, 17 nt, Homo sapiens
uaacacugguuaaauua

SEQ ID NO: 466 - RNA, 17 nt, Homo sapiens
cugguuaaauuaacauu

SEQ ID NO: 467 - RNA, 17 nt, Homo sapiens
uuaaauuaacauugcau

SEQ ID NO: 468 - RNA, 17 nt, Homo sapiens
aaauuaacauugcauaa

SEQ ID NO: 469 - RNA, 17 nt, Homo sapiens
uuaacauugcauaaaca

SEQ ID NO: 470 - RNA, 17 nt, Homo sapiens
aacauugcauaaacacu

SEQ ID NO: 471 - RNA, 17 nt, Homo sapiens
uugcauaaacacuuuuc

SEQ ID NO: 472 - RNA, 17 nt, Homo sapiens
gcauaaacacuuuucaa

SEQ ID NO: 473 - RNA, 17 nt, Homo sapiens
cuuuucaagucugaucc

SEQ ID NO: 474 - RNA, 17 nt, Homo sapiens
caagucugauccauauu

SEQ ID NO: 475 - RNA, 17 nt, Homo sapiens
ucugauccauauuuaau

SEQ ID NO: 476 - RNA, 17 nt, Homo sapiens
ugauccauauuuaauaa

SEQ ID NO: 477 - RNA, 17 nt, Homo sapiens
cauauuuaauaaugcuu

SEQ ID NO: 478 - RNA, 17 nt, Homo sapiens
auuuaauaaugcuuuaa

SEQ ID NO: 479 - RNA, 17 nt, Homo sapiens
uuaauaaugcuuuaaaa

SEQ ID NO: 480 - RNA, 17 nt, Homo sapiens
gcuuuaaaauaaaaaua

SEQ ID NO: 481 - RNA, 17 nt, Homo sapiens
aaauaaaaauaaaaaca

SEQ ID NO: 482 - RNA, 17 nt, Homo sapiens
aaauaaaaacaauccuu

SEQ ID NO: 483 - RNA, 17 nt, Homo sapiens
uaaaaacaauccuuuug

SEQ ID NO: 484 - RNA, 17 nt, Homo sapiens
uccuuuugauaaauuua

SEQ ID NO: 485 - RNA, 17 nt, Homo sapiens
uuugauaaauuuaaaau

SEQ ID NO: 486 - RNA, 17 nt, Homo sapiens
aauuuaaaauguuacuu

SEQ ID NO: 487 - RNA, 17 nt, Homo sapiens
uuuaaaauguuacuuau

SEQ ID NO: 488 - RNA, 17 nt, Homo sapiens
aaaauguuacuuauuuu

SEQ ID NO: 489 - RNA, 17 nt, Homo sapiens
uguuacuuauuuuaaaa

SEQ ID NO: 490 - RNA, 17 nt, Homo sapiens
auuuuaaaauaaaugaa

SEQ ID NO: 491 - RNA, 17 nt, Homo sapiens
uaaaauaaaugaaguga

SEQ ID NO: 492 - RNA, 17 nt, Homo sapiens
uaaaugaagugagaugg

SEQ ID NO: 493 - RNA, 17 nt, Homo sapiens
gaagugagauggcaugg

SEQ ID NO: 494 - RNA, 17 nt, Homo sapiens
gugagauggcaugguga

SEQ ID NO: 495 - RNA, 17 nt, Homo sapiens
gagauggcauggugagg

SEQ ID NO: 496 - RNA, 17 nt, Homo sapiens
auggcauggugagguga

SEQ ID NO: 497 - RNA, 17 nt, Homo sapiens
auggugaggugaaagua

SEQ ID NO: 498 - RNA, 17 nt, Homo sapiens
aggugaaaguaucacug

SEQ ID NO: 499 - RNA, 17 nt, Homo sapiens
gugaaaguaucacugga

SEQ ID NO: 500 - RNA, 17 nt, Homo sapiens
aaaguaucacuggacua

SEQ ID NO: 501 - RNA, 17 nt, Homo sapiens
aucacuggacuagguug

SEQ ID NO: 502 - RNA, 17 nt, Homo sapiens
uggacuagguuguuggu

SEQ ID NO: 503 - RNA, 17 nt, Homo sapiens
acuagguuguuggugac

SEQ ID NO: 504 - RNA, 17 nt, Homo sapiens
gguuguuggugacuuag

SEQ ID NO: 505 - RNA, 17 nt, Homo sapiens
uguuggugacuuagguu

SEQ ID NO: 506 - RNA, 17 nt, Homo sapiens
ugacuuagguucuagau

SEQ ID NO: 507 - RNA, 17 nt, Homo sapiens
gguucuagauagguguc

SEQ ID NO: 508 - RNA, 17 nt, Homo sapiens
cuagauaggugucuuuu

SEQ ID NO: 509 - RNA, 17 nt, Homo sapiens
agauaggugucuuuuag

SEQ ID NO: 510 - RNA, 17 nt, Homo sapiens
cuuuuaggacucugauu

SEQ ID NO: 511 - RNA, 17 nt, Homo sapiens
ggacucugauuuugagg

SEQ ID NO: 512 - RNA, 17 nt, Homo sapiens
uuuugaggacaucacuu

SEQ ID NO: 513 - RNA, 17 nt, Homo sapiens
uugaggacaucacuuac

SEQ ID NO: 514 - RNA, 17 nt, Homo sapiens
aggacaucacuuacuau

SEQ ID NO: 515 - RNA, 17 nt, Homo sapiens
caucacuuacuauccau

SEQ ID NO: 516 - RNA, 17 nt, Homo sapiens
cacuuacuauccauuuc

SEQ ID NO: 517 - RNA, 17 nt, Homo sapiens
uacuauccauuucuuca

SEQ ID NO: 518 - RNA, 17 nt, Homo sapiens
auuucuucauguuaaaa

SEQ ID NO: 519 - RNA, 17 nt, Homo sapiens
uucuucauguuaaaaga

SEQ ID NO: 520 - RNA, 17 nt, Homo sapiens
uaaaagaagucaucuca

SEQ ID NO: 521 - RNA, 17 nt, Homo sapiens
aagaagucaucucaaac

SEQ ID NO: 522 - RNA, 17 nt, Homo sapiens
caucucaaacucuuagu

SEQ ID NO: 523 - RNA, 17 nt, Homo sapiens
aacucuuaguuuuuuuu

SEQ ID NO: 524 - RNA, 17 nt, Homo sapiens
uuuuuuuuacacuaugu

SEQ ID NO: 525 - RNA, 17 nt, Homo sapiens
uuuuuuacacuauguga

SEQ ID NO: 526 - RNA, 17 nt, Homo sapiens
uuuacacuaugugauuu

SEQ ID NO: 527 - RNA, 17 nt, Homo sapiens
uacacuaugugauuuau

SEQ ID NO: 528 - RNA, 17 nt, Homo sapiens
acuaugugauuuauauu

SEQ ID NO: 529 - RNA, 17 nt, Homo sapiens
ugugauuuauauuccau

SEQ ID NO: 530 - RNA, 17 nt, Homo sapiens
ugauuuauauuccauuu

SEQ ID NO: 531 - RNA, 17 nt, Homo sapiens
uauauuccauuuacaua

SEQ ID NO: 532 - RNA, 17 nt, Homo sapiens
uuccauuuacauaagga

SEQ ID NO: 533 - RNA, 17 nt, Homo sapiens
ccauuuacauaaggaua

SEQ ID NO: 534 - RNA, 17 nt, Homo sapiens
acauaaggauacacuua

SEQ ID NO: 535 - RNA, 17 nt, Homo sapiens
auaaggauacacuuauu

SEQ ID NO: 536 - RNA, 17 nt, Homo sapiens
aaggauacacuuauuug

SEQ ID NO: 537 - RNA, 17 nt, Homo sapiens
auacacuuauuugucaa

SEQ ID NO: 538 - RNA, 17 nt, Homo sapiens
acuuauuugucaagcuc

SEQ ID NO: 539 - RNA, 17 nt, Homo sapiens
uuugucaagcucagcac

SEQ ID NO: 540 - RNA, 17 nt, Homo sapiens
caagcucagcacaaucu

SEQ ID NO: 541 - RNA, 17 nt, Homo sapiens
agcucagcacaaucugu

SEQ ID NO: 542 - RNA, 17 nt, Homo sapiens
ucagcacaaucuguaaa

SEQ ID NO: 543 - RNA, 17 nt, Homo sapiens
cacaaucuguaaauuuu

SEQ ID NO: 544 - RNA, 17 nt, Homo sapiens
aucuguaaauuuuuaac

SEQ ID NO: 545 - RNA, 17 nt, Homo sapiens
aauuuuuaaccuauguu

SEQ ID NO: 546 - RNA, 17 nt, Homo sapiens
uuuaaccuauguuacac

SEQ ID NO: 547 - RNA, 17 nt, Homo sapiens
uaaccuauguuacacca

SEQ ID NO: 548 - RNA, 17 nt, Homo sapiens
ccuauguuacaccaucu

SEQ ID NO: 549 - RNA, 17 nt, Homo sapiens
uauguuacaccaucuuc

SEQ ID NO: 550 - RNA, 17 nt, Homo sapiens
guuacaccaucuucagu

SEQ ID NO: 551 - RNA, 17 nt, Homo sapiens
caucuucagugccaguc

SEQ ID NO: 552 - RNA, 17 nt, Homo sapiens
ucuucagugccagucuu

SEQ ID NO: 553 - RNA, 17 nt, Homo sapiens
cagugccagucuugggc

SEQ ID NO: 554 - RNA, 17 nt, Homo sapiens
agucuugggcaaaauug

SEQ ID NO: 555 - RNA, 17 nt, Homo sapiens
ugggcaaaauugugcaa

SEQ ID NO: 556 - RNA, 17 nt, Homo sapiens
gcaaaauugugcaagag

SEQ ID NO: 557 - RNA, 17 nt, Homo sapiens
aaaauugugcaagaggu

SEQ ID NO: 558 - RNA, 17 nt, Homo sapiens
ugcaagaggugaaguuu

SEQ ID NO: 559 - RNA, 17 nt, Homo sapiens
gaggugaaguuuauauu

SEQ ID NO: 560 - RNA, 17 nt, Homo sapiens
ugaaguuuauauuugaa

SEQ ID NO: 561 - RNA, 17 nt, Homo sapiens
aaguuuauauuugaaua

SEQ ID NO: 562 - RNA, 17 nt, Homo sapiens
auauuugaauauccauu

SEQ ID NO: 563 - RNA, 17 nt, Homo sapiens
auuugaauauccauucu

SEQ ID NO: 564 - RNA, 17 nt, Homo sapiens
gaauauccauucucguu

SEQ ID NO: 565 - RNA, 17 nt, Homo sapiens
ccauucucguuuuagga

SEQ ID NO: 566 - RNA, 17 nt, Homo sapiens
guuuuaggacucuucuu

SEQ ID NO: 567 - RNA, 17 nt, Homo sapiens
cuucuuccauauuagug

SEQ ID NO: 568 - RNA, 17 nt, Homo sapiens
ucuuccauauuaguguc

SEQ ID NO: 569 - RNA, 17 nt, Homo sapiens
ccauauuagugucaucu

SEQ ID NO: 570 - RNA, 17 nt, Homo sapiens
auauuagugucaucuug

SEQ ID NO: 571 - RNA, 17 nt, Homo sapiens
uuagugucaucuugccu

SEQ ID NO: 572 - RNA, 17 nt, Homo sapiens
gucaucuugccucccua

SEQ ID NO: 573 - RNA, 17 nt, Homo sapiens
gccucccuaccuuccac

SEQ ID NO: 574 - RNA, 17 nt, Homo sapiens
uaccuuccacaugcccc

SEQ ID NO: 575 - RNA, 17 nt, Homo sapiens
ccuuccacaugccccau

SEQ ID NO: 576 - RNA, 17 nt, Homo sapiens
uuccacaugccccauga

SEQ ID NO: 577 - RNA, 17 nt, Homo sapiens
caugccccaugacuuga

SEQ ID NO: 578 - RNA, 17 nt, Homo sapiens
gccccaugacuugaugc

SEQ ID NO: 579 - RNA, 17 nt, Homo sapiens
augacuugaugcaguuu

SEQ ID NO: 580 - RNA, 17 nt, Homo sapiens
gacuugaugcaguuuua

SEQ ID NO: 581 - RNA, 17 nt, Homo sapiens
uugaugcaguuuuaaua

SEQ ID NO: 582 - RNA, 17 nt, Homo sapiens
caguuuuaauacuugua

SEQ ID NO: 583 - RNA, 17 nt, Homo sapiens
guuuuaauacuuguaau

SEQ ID NO: 584 - RNA, 17 nt, Homo sapiens
uaauacuuguaauuccc

SEQ ID NO: 585 - RNA, 17 nt, Homo sapiens
uacuuguaauuccccua

SEQ ID NO: 586 - RNA, 17 nt, Homo sapiens
uuccccuaaccauaaga

SEQ ID NO: 587 - RNA, 17 nt, Homo sapiens
cccuaaccauaagauuu

SEQ ID NO: 588 - RNA, 17 nt, Homo sapiens
accauaagauuuacugc

SEQ ID NO: 589 - RNA, 17 nt, Homo sapiens
uaagauuuacugcugcu

SEQ ID NO: 590 - RNA, 17 nt, Homo sapiens
gauuuacugcugcugug

SEQ ID NO: 591 - RNA, 17 nt, Homo sapiens
uuacugcugcuguggau

SEQ ID NO: 592 - RNA, 17 nt, Homo sapiens
cugcugcuguggauauc

SEQ ID NO: 593 - RNA, 17 nt, Homo sapiens
ugcuguggauaucucca

SEQ ID NO: 594 - RNA, 17 nt, Homo sapiens
cuguggauaucuccaug

SEQ ID NO: 595 - RNA, 17 nt, Homo sapiens
auaucuccaugaaguuu

SEQ ID NO: 596 - RNA, 17 nt, Homo sapiens
uccaugaaguuuuccca

SEQ ID NO: 597 - RNA, 17 nt, Homo sapiens
guuuucccacugaguca

SEQ ID NO: 598 - RNA, 17 nt, Homo sapiens
cccacugagucacauca

SEQ ID NO: 599 - RNA, 17 nt, Homo sapiens
acugagucacaucagaa

SEQ ID NO: 600 - RNA, 17 nt, Homo sapiens
ugagucacaucagaaau

SEQ ID NO: 601 - RNA, 17 nt, Homo sapiens
caucagaaaugcccuac

SEQ ID NO: 602 - RNA, 17 nt, Homo sapiens
ucagaaaugcccuacau

SEQ ID NO: 603 - RNA, 17 nt, Homo sapiens
aaugcccuacaucuuau

SEQ ID NO: 604 - RNA, 17 nt, Homo sapiens
ugcccuacaucuuauuu

SEQ ID NO: 605 - RNA, 17 nt, Homo sapiens
uacaucuuauuuuccuc

SEQ ID NO: 606 - RNA, 17 nt, Homo sapiens
uccucagggcucaagag

SEQ ID NO: 607 - RNA, 17 nt, Homo sapiens
ucaagagaaucugacag

SEQ ID NO: 608 - RNA, 17 nt, Homo sapiens
agaaucugacagauacc

SEQ ID NO: 609 - RNA, 17 nt, Homo sapiens
ucugacagauaccauaa

SEQ ID NO: 610 - RNA, 17 nt, Homo sapiens
ugacagauaccauaaag

SEQ ID NO: 611 - RNA, 17 nt, Homo sapiens
cagauaccauaaaggga

SEQ ID NO: 612 - RNA, 17 nt, Homo sapiens
auaaagggauuugaccu

SEQ ID NO: 613 - RNA, 17 nt, Homo sapiens
gggauuugaccuaauca

SEQ ID NO: 614 - RNA, 17 nt, Homo sapiens
uugaccuaaucacuaau

SEQ ID NO: 615 - RNA, 17 nt, Homo sapiens
accuaaucacuaauuuu

SEQ ID NO: 616 - RNA, 17 nt, Homo sapiens
aaucacuaauuuucagg

SEQ ID NO: 617 - RNA, 17 nt, Homo sapiens
auuuucaggugguggcu

SEQ ID NO: 618 - RNA, 17 nt, Homo sapiens
uucaggugguggcugau

SEQ ID NO: 619 - RNA, 17 nt, Homo sapiens
aggugguggcugaugcu

SEQ ID NO: 620 - RNA, 17 nt, Homo sapiens
gguggcugaugcuuuga

SEQ ID NO: 621 - RNA, 17 nt, Homo sapiens
uggcugaugcuuugaac

SEQ ID NO: 622 - RNA, 17 nt, Homo sapiens
ugcuuugaacaucucuu

SEQ ID NO: 623 - RNA, 17 nt, Homo sapiens
cuuugaacaucucuuug

SEQ ID NO: 624 - RNA, 17 nt, Homo sapiens
aucucuuugcugcccaa

SEQ ID NO: 625 - RNA, 17 nt, Homo sapiens
ucuuugcugcccaaucc

SEQ ID NO: 626 - RNA, 17 nt, Homo sapiens
gcugcccaauccauuag

SEQ ID NO: 627 - RNA, 17 nt, Homo sapiens
cccaauccauuagcgac

SEQ ID NO: 628 - RNA, 17 nt, Homo sapiens
auccauuagcgacagua

SEQ ID NO: 629 - RNA, 17 nt, Homo sapiens
cauuagcgacaguagga

SEQ ID NO: 630 - RNA, 17 nt, Homo sapiens
uagcgacaguaggauuu

SEQ ID NO: 631 - RNA, 17 nt, Homo sapiens
acaguaggauuuuucaa

SEQ ID NO: 632 - RNA, 17 nt, Homo sapiens
auuuuucaacccuggua

SEQ ID NO: 633 - RNA, 17 nt, Homo sapiens
caacccugguaugaaua

SEQ ID NO: 634 - RNA, 17 nt, Homo sapiens
acccugguaugaauaga

SEQ ID NO: 635 - RNA, 17 nt, Homo sapiens
ugguaugaauagacaga

SEQ ID NO: 636 - RNA, 17 nt, Homo sapiens
augaauagacagaaccc

SEQ ID NO: 637 - RNA, 17 nt, Homo sapiens
uagacagaacccuaucc

SEQ ID NO: 638 - RNA, 17 nt, Homo sapiens
agaacccuauccagugg

SEQ ID NO: 639 - RNA, 17 nt, Homo sapiens
ccuauccaguggaagga

SEQ ID NO: 640 - RNA, 17 nt, Homo sapiens
gaaggagaauuuaauaa

SEQ ID NO: 641 - RNA, 17 nt, Homo sapiens
agaauuuaauaaagaua

SEQ ID NO: 642 - RNA, 17 nt, Homo sapiens
uaauaaagauagugcag

SEQ ID NO: 643 - RNA, 17 nt, Homo sapiens
uaaagauagugcagaaa

SEQ ID NO: 644 - RNA, 17 nt, Homo sapiens
aagauagugcagaaaga

SEQ ID NO: 645 - RNA, 17 nt, Homo sapiens
cagaaagaauuccuuag

SEQ ID NO: 646 - RNA, 17 nt, Homo sapiens
uuccuuagguaaucuau

SEQ ID NO: 647 - RNA, 17 nt, Homo sapiens
cuuagguaaucuauaac

SEQ ID NO: 648 - RNA, 17 nt, Homo sapiens
gguaaucuauaacuagg

SEQ ID NO: 649 - RNA, 17 nt, Homo sapiens
aaucuauaacuaggacu

SEQ ID NO: 650 - RNA, 17 nt, Homo sapiens
uaacuaggacuacuccu

SEQ ID NO: 651 - RNA, 17 nt, Homo sapiens
cuaggacuacuccuggu

SEQ ID NO: 652 - RNA, 17 nt, Homo sapiens
uacuccugguaacagua

SEQ ID NO: 653 - RNA, 17 nt, Homo sapiens
uccugguaacaguaaua

SEQ ID NO: 654 - RNA, 17 nt, Homo sapiens
ugguaacaguaauacau

SEQ ID NO: 655 - RNA, 17 nt, Homo sapiens
uaacaguaauacauucc

SEQ ID NO: 656 - RNA, 17 nt, Homo sapiens
acaguaauacauuccau

SEQ ID NO: 657 - RNA, 17 nt, Homo sapiens
aguaauacauuccauug

SEQ ID NO: 658 - RNA, 17 nt, Homo sapiens
uacauuccauuguuuua

SEQ ID NO: 659 - RNA, 17 nt, Homo sapiens
auuccauuguuuuagua

SEQ ID NO: 660 - RNA, 17 nt, Homo sapiens
uuguuuuaguaaccaga

SEQ ID NO: 661 - RNA, 17 nt, Homo sapiens
uuuuaguaaccagaaau

SEQ ID NO: 662 - RNA, 17 nt, Homo sapiens
aaccagaaaucuucaug

SEQ ID NO: 663 - RNA, 17 nt, Homo sapiens
aaaucuucaugcaauga

SEQ ID NO: 664 - RNA, 17 nt, Homo sapiens
aucuucaugcaaugaaa

SEQ ID NO: 665 - RNA, 17 nt, Homo sapiens
uucaugcaaugaaaaau

SEQ ID NO: 666 - RNA, 17 nt, Homo sapiens
aaugaaaaauacuuuaa

SEQ ID NO: 667 - RNA, 17 nt, Homo sapiens
ugaaaaauacuuuaauu

SEQ ID NO: 668 - RNA, 17 nt, Homo sapiens
auacuuuaauucaugaa

SEQ ID NO: 669 - RNA, 17 nt, Homo sapiens
uuuaauucaugaagcuu

SEQ ID NO: 670 - RNA, 17 nt, Homo sapiens
uucaugaagcuuacuuu

SEQ ID NO: 671 - RNA, 17 nt, Homo sapiens
ugaagcuuacuuuuuuu

SEQ ID NO: 672 - RNA, 17 nt, Homo sapiens
uuuuuuuggugucagag

SEQ ID NO: 673 - RNA, 17 nt, Homo sapiens
uuuuuggugucagaguc

SEQ ID NO: 674 - RNA, 17 nt, Homo sapiens
gugucagagucucgcuc

SEQ ID NO: 675 - RNA, 17 nt, Homo sapiens
agagucucgcucuuguc

SEQ ID NO: 676 - RNA, 17 nt, Homo sapiens
ucgcucuugucacccag

SEQ ID NO: 677 - RNA, 17 nt, Homo sapiens
cucuugucacccaggcu

SEQ ID NO: 678 - RNA, 17 nt, Homo sapiens
ucacccaggcuggaaug

SEQ ID NO: 679 - RNA, 17 nt, Homo sapiens
aggcuggaaugcagugg

SEQ ID NO: 680 - RNA, 17 nt, Homo sapiens
gcuggaaugcaguggcg

SEQ ID NO: 681 - RNA, 17 nt, Homo sapiens
ggaaugcaguggcgcca

SEQ ID NO: 682 - RNA, 17 nt, Homo sapiens
augcaguggcgccaucu

SEQ ID NO: 683 - RNA, 17 nt, Homo sapiens
gcaguggcgccaucuca

SEQ ID NO: 684 - RNA, 17 nt, Homo sapiens
guggcgccaucucagcu

SEQ ID NO: 685 - RNA, 17 nt, Homo sapiens
ccaucucagcucacugc

SEQ ID NO: 686 - RNA, 17 nt, Homo sapiens
cucagcucacugcaacc

SEQ ID NO: 687 - RNA, 17 nt, Homo sapiens
agcucacugcaaccuuc

SEQ ID NO: 688 - RNA, 17 nt, Homo sapiens
ucacugcaaccuuccau

SEQ ID NO: 689 - RNA, 17 nt, Homo sapiens
aaccuuccaucuuccca

SEQ ID NO: 690 - RNA, 17 nt, Homo sapiens
cuucccagguucaagcg

SEQ ID NO: 691 - RNA, 17 nt, Homo sapiens
agguucaagcgauucuc

SEQ ID NO: 692 - RNA, 17 nt, Homo sapiens
uucaagcgauucucgug

SEQ ID NO: 693 - RNA, 17 nt, Homo sapiens
cgauucucgugccucgg

SEQ ID NO: 694 - RNA, 17 nt, Homo sapiens
auucucgugccucggcc

SEQ ID NO: 695 - RNA, 17 nt, Homo sapiens
gugccucggccuccuga

SEQ ID NO: 696 - RNA, 17 nt, Homo sapiens
ccuccugaguagcuggg

SEQ ID NO: 697 - RNA, 17 nt, Homo sapiens
ccugaguagcugggauu

SEQ ID NO: 698 - RNA, 17 nt, Homo sapiens
uagcugggauuacaggc

SEQ ID NO: 699 - RNA, 17 nt, Homo sapiens
cugggauuacaggcgug

SEQ ID NO: 700 - RNA, 17 nt, Homo sapiens
gauuacaggcgugugca

SEQ ID NO: 701 - RNA, 17 nt, Homo sapiens
uuacaggcgugugcacu

SEQ ID NO: 702 - RNA, 17 nt, Homo sapiens
acaggcgugugcacuac

SEQ ID NO: 703 - RNA, 17 nt, Homo sapiens
aggcgugugcacuacac

SEQ ID NO: 704 - RNA, 17 nt, Homo sapiens
gcgugugcacuacacuc

SEQ ID NO: 705 - RNA, 17 nt, Homo sapiens
ugugcacuacacucaac

SEQ ID NO: 706 - RNA, 17 nt, Homo sapiens
ugcacuacacucaacua

SEQ ID NO: 707 - RNA, 17 nt, Homo sapiens
uacacucaacuaauuuu

SEQ ID NO: 708 - RNA, 17 nt, Homo sapiens
cucaacuaauuuuugua

SEQ ID NO: 709 - RNA, 17 nt, Homo sapiens
uaauuuuuguauuuuua

SEQ ID NO: 710 - RNA, 17 nt, Homo sapiens
auuuuuguauuuuuagg

SEQ ID NO: 711 - RNA, 17 nt, Homo sapiens
uaggagagacgggguuu

SEQ ID NO: 712 - RNA, 17 nt, Homo sapiens
gagacgggguuucaccu

SEQ ID NO: 713 - RNA, 17 nt, Homo sapiens
gggguuucaccuguugg

SEQ ID NO: 714 - RNA, 17 nt, Homo sapiens
uuucaccuguuggccag

SEQ ID NO: 715 - RNA, 17 nt, Homo sapiens
accuguuggccaggcug

SEQ ID NO: 716 - RNA, 17 nt, Homo sapiens
uuggccaggcuggucuc

SEQ ID NO: 717 - RNA, 17 nt, Homo sapiens
ccaggcuggucucgaac

SEQ ID NO: 718 - RNA, 17 nt, Homo sapiens
ggucucgaacuccugac

SEQ ID NO: 719 - RNA, 17 nt, Homo sapiens
aacuccugaccucaagu

SEQ ID NO: 720 - RNA, 17 nt, Homo sapiens
gaccucaagugauucac

SEQ ID NO: 721 - RNA, 17 nt, Homo sapiens
cucaagugauucaccca

SEQ ID NO: 722 - RNA, 17 nt, Homo sapiens
agugauucacccaccuu

SEQ ID NO: 723 - RNA, 17 nt, Homo sapiens
auucacccaccuuggcc

SEQ ID NO: 724 - RNA, 17 nt, Homo sapiens
ccaccuuggccucauaa

SEQ ID NO: 725 - RNA, 17 nt, Homo sapiens
uuggccucauaaaccug

SEQ ID NO: 726 - RNA, 17 nt, Homo sapiens
ccucauaaaccuguuuu

SEQ ID NO: 727 - RNA, 17 nt, Homo sapiens
auaaaccuguuuugcag

SEQ ID NO: 728 - RNA, 17 nt, Homo sapiens
ccuguuuugcagaacuc

SEQ ID NO: 729 - RNA, 17 nt, Homo sapiens
uuugcagaacucauuua

SEQ ID NO: 730 - RNA, 17 nt, Homo sapiens
cagaacucauuuauuca

SEQ ID NO: 731 - RNA, 17 nt, Homo sapiens
acucauuuauucagcaa

SEQ ID NO: 732 - RNA, 17 nt, Homo sapiens
uuuauucagcaaauauu

SEQ ID NO: 733 - RNA, 17 nt, Homo sapiens
uucagcaaauauuuauu

SEQ ID NO: 734 - RNA, 17 nt, Homo sapiens
cagcaaauauuuauuga

SEQ ID NO: 735 - RNA, 17 nt, Homo sapiens
aaauauuuauugagugc

SEQ ID NO: 736 - RNA, 17 nt, Homo sapiens
uuuauugagugccuacc

SEQ ID NO: 737 - RNA, 17 nt, Homo sapiens
uauugagugccuaccag

SEQ ID NO: 738 - RNA, 17 nt, Homo sapiens
gagugccuaccagaugc

SEQ ID NO: 739 - RNA, 17 nt, Homo sapiens
ccuaccagaugccaguc

SEQ ID NO: 740 - RNA, 17 nt, Homo sapiens
uaccagaugccagucac

SEQ ID NO: 741 - RNA, 17 nt, Homo sapiens
agaugccagucaccgca

SEQ ID NO: 742 - RNA, 17 nt, Homo sapiens
ugccagucaccgcacaa

SEQ ID NO: 743 - RNA, 17 nt, Homo sapiens
cagucaccgcacaaggc

SEQ ID NO: 744 - RNA, 17 nt, Homo sapiens
gucaccgcacaaggcac

SEQ ID NO: 745 - RNA, 17 nt, Homo sapiens
cgcacaaggcacugggu

SEQ ID NO: 746 - RNA, 17 nt, Homo sapiens
cacaaggcacuggguau

SEQ ID NO: 747 - RNA, 17 nt, Homo sapiens
ggcacuggguauauggu

SEQ ID NO: 748 - RNA, 17 nt, Homo sapiens
cacuggguauaugguau

SEQ ID NO: 749 - RNA, 17 nt, Homo sapiens
cuggguauaugguaucc

SEQ ID NO: 750 - RNA, 17 nt, Homo sapiens
gguauaugguaucccca

SEQ ID NO: 751 - RNA, 17 nt, Homo sapiens
uauaugguauccccaaa

SEQ ID NO: 752 - RNA, 17 nt, Homo sapiens
auccccaaacaagagac

SEQ ID NO: 753 - RNA, 17 nt, Homo sapiens
aacaagagacauaaucc

SEQ ID NO: 754 - RNA, 17 nt, Homo sapiens
caagagacauaaucccg

SEQ ID NO: 755 - RNA, 17 nt, Homo sapiens
gagacauaaucccgguc

SEQ ID NO: 756 - RNA, 17 nt, Homo sapiens
uaaucccgguccuuagg

SEQ ID NO: 757 - RNA, 17 nt, Homo sapiens
guccuuagguacugcua

SEQ ID NO: 758 - RNA, 17 nt, Homo sapiens
ccuuagguacugcuagu

SEQ ID NO: 759 - RNA, 17 nt, Homo sapiens
uagguacugcuagugug

SEQ ID NO: 760 - RNA, 17 nt, Homo sapiens
uacugcuaguguggucu

SEQ ID NO: 761 - RNA, 17 nt, Homo sapiens
cugcuaguguggucugu

SEQ ID NO: 762 - RNA, 17 nt, Homo sapiens
cuaguguggucuguaau

SEQ ID NO: 763 - RNA, 17 nt, Homo sapiens
uguggucuguaauaucu

SEQ ID NO: 764 - RNA, 17 nt, Homo sapiens
ggucuguaauaucuuac

SEQ ID NO: 765 - RNA, 17 nt, Homo sapiens
ucuguaauaucuuacua

SEQ ID NO: 766 - RNA, 17 nt, Homo sapiens
aauaucuuacuaaggcc

SEQ ID NO: 767 - RNA, 17 nt, Homo sapiens
uuacuaaggccuuuggu

SEQ ID NO: 768 - RNA, 17 nt, Homo sapiens
ggccuuugguauacgac

SEQ ID NO: 769 - RNA, 17 nt, Homo sapiens
ccuuugguauacgaccc

SEQ ID NO: 770 - RNA, 17 nt, Homo sapiens
uuugguauacgacccag

SEQ ID NO: 771 - RNA, 17 nt, Homo sapiens
gguauacgacccagaga

SEQ ID NO: 772 - RNA, 17 nt, Homo sapiens
acccagagauaacacga

SEQ ID NO: 773 - RNA, 17 nt, Homo sapiens
cagagauaacacgaugc

SEQ ID NO: 774 - RNA, 17 nt, Homo sapiens
gagauaacacgaugcgu

SEQ ID NO: 775 - RNA, 17 nt, Homo sapiens
auaacacgaugcguauu

SEQ ID NO: 776 - RNA, 17 nt, Homo sapiens
aacacgaugcguauuuu

SEQ ID NO: 777 - RNA, 17 nt, Homo sapiens
cacgaugcguauuuuag

SEQ ID NO: 778 - RNA, 17 nt, Homo sapiens
cgaugcguauuuuaguu

SEQ ID NO: 779 - RNA, 17 nt, Homo sapiens
guauuuuaguuuugcaa

SEQ ID NO: 780 - RNA, 17 nt, Homo sapiens
uuaguuuugcaaagaag

SEQ ID NO: 781 - RNA, 17 nt, Homo sapiens
aagaagggguuuggucu

SEQ ID NO: 782 - RNA, 17 nt, Homo sapiens
gggguuuggucucugug

SEQ ID NO: 783 - RNA, 17 nt, Homo sapiens
uggucucugugccagcu

SEQ ID NO: 784 - RNA, 17 nt, Homo sapiens
gucucugugccagcucu

SEQ ID NO: 785 - RNA, 17 nt, Homo sapiens
cugugccagcucuauaa

SEQ ID NO: 786 - RNA, 17 nt, Homo sapiens
ccagcucuauaauuguu

SEQ ID NO: 787 - RNA, 17 nt, Homo sapiens
gcucuauaauuguuuug

SEQ ID NO: 788 - RNA, 17 nt, Homo sapiens
cuauaauuguuuugcua

SEQ ID NO: 789 - RNA, 17 nt, Homo sapiens
auuguuuugcuacgauu

SEQ ID NO: 790 - RNA, 17 nt, Homo sapiens
guuuugcuacgauucca

SEQ ID NO: 791 - RNA, 17 nt, Homo sapiens
uugcuacgauuccacug

SEQ ID NO: 792 - RNA, 17 nt, Homo sapiens
acgauuccacugaaacu

SEQ ID NO: 793 - RNA, 17 nt, Homo sapiens
ccacugaaacucuucga

SEQ ID NO: 794 - RNA, 17 nt, Homo sapiens
acucuucgaucaagcua

SEQ ID NO: 795 - RNA, 17 nt, Homo sapiens
ucgaucaagcuacuuua

SEQ ID NO: 796 - RNA, 17 nt, Homo sapiens
aucaagcuacuuuaugu

SEQ ID NO: 797 - RNA, 17 nt, Homo sapiens
gcuacuuuauguaaauc

SEQ ID NO: 798 - RNA, 17 nt, Homo sapiens
uacuuuauguaaaucac

SEQ ID NO: 799 - RNA, 17 nt, Homo sapiens
uuauguaaaucacuuca

SEQ ID NO: 800 - RNA, 17 nt, Homo sapiens
uguaaaucacuucauug

SEQ ID NO: 801 - RNA, 17 nt, Homo sapiens
aucacuucauuguuuua

SEQ ID NO: 802 - RNA, 17 nt, Homo sapiens
acuucauuguuuuaaag

SEQ ID NO: 803 - RNA, 17 nt, Homo sapiens
uuaaaggaauaaacuug

SEQ ID NO: 804 - RNA, 17 nt, Homo sapiens
aggaauaaacuugauua

SEQ ID NO: 805 - RNA, 17 nt, Homo sapiens
uaaacuugauuauauug

SEQ ID NO: 806 - RNA, 17 nt, Homo sapiens
acuugauuauauuguuu

SEQ ID NO: 807 - RNA, 17 nt, Homo sapiens
uugauuauauuguuuuu

SEQ ID NO: 808 - RNA, 17 nt, Homo sapiens
auuauauuguuuuuuua

SEQ ID NO: 809 - RNA, 17 nt, Homo sapiens
guuuuuuuauuuggcau

SEQ ID NO: 810 - RNA, 17 nt, Homo sapiens
uuuauuuggcauaacug

SEQ ID NO: 811 - RNA, 17 nt, Homo sapiens
uauuuggcauaacugug

SEQ ID NO: 812 - RNA, 17 nt, Homo sapiens
uuggcauaacugugauu

SEQ ID NO: 813 - RNA, 17 nt, Homo sapiens
gcauaacugugauucuu

SEQ ID NO: 814 - RNA, 17 nt, Homo sapiens
uaacugugauucuuuua

SEQ ID NO: 815 - RNA, 17 nt, Homo sapiens
cuuuuaggacaauuacu

SEQ ID NO: 816 - RNA, 17 nt, Homo sapiens
uuaggacaauuacugua

SEQ ID NO: 817 - RNA, 17 nt, Homo sapiens
ggacaauuacuguacac

SEQ ID NO: 818 - RNA, 17 nt, Homo sapiens
caauuacuguacacauu

SEQ ID NO: 819 - RNA, 17 nt, Homo sapiens
auuacuguacacauuaa

SEQ ID NO: 820 - RNA, 17 nt, Homo sapiens
uacuguacacauuaagg

SEQ ID NO: 821 - RNA, 17 nt, Homo sapiens
cuguacacauuaaggug

SEQ ID NO: 822 - RNA, 17 nt, Homo sapiens
acauuaagguguauguc

SEQ ID NO: 823 - RNA, 17 nt, Homo sapiens
auuaagguguaugucag

SEQ ID NO: 824 - RNA, 17 nt, Homo sapiens
uaagguguaugucagau

SEQ ID NO: 825 - RNA, 17 nt, Homo sapiens
agguguaugucagauau

SEQ ID NO: 826 - RNA, 17 nt, Homo sapiens
uaugucagauauucaua

SEQ ID NO: 827 - RNA, 17 nt, Homo sapiens
ugucagauauucauauu

SEQ ID NO: 828 - RNA, 17 nt, Homo sapiens
agauauucauauugacc

SEQ ID NO: 829 - RNA, 17 nt, Homo sapiens
auauucauauugaccca

SEQ ID NO: 830 - RNA, 17 nt, Homo sapiens
ucauauugacccaaaug

SEQ ID NO: 831 - RNA, 17 nt, Homo sapiens
ugacccaaauguguaau

SEQ ID NO: 832 - RNA, 17 nt, Homo sapiens
acccaaauguguaauau

SEQ ID NO: 833 - RNA, 17 nt, Homo sapiens
ccaaauguguaauauuc

SEQ ID NO: 834 - RNA, 17 nt, Homo sapiens
aauguguaauauuccag

SEQ ID NO: 835 - RNA, 17 nt, Homo sapiens
uguguaauauuccaguu

SEQ ID NO: 836 - RNA, 17 nt, Homo sapiens
auauuccaguuuucucu

SEQ ID NO: 837 - RNA, 17 nt, Homo sapiens
uuuucucugcauaagua

SEQ ID NO: 838 - RNA, 17 nt, Homo sapiens
uucucugcauaaguaau

SEQ ID NO: 839 - RNA, 17 nt, Homo sapiens
cugcauaaguaauuaaa

SEQ ID NO: 840 - RNA, 17 nt, Homo sapiens
cauaaguaauuaaaaua

SEQ ID NO: 841 - RNA, 17 nt, Homo sapiens
uaauuaaaauauacuua

SEQ ID NO: 842 - RNA, 17 nt, Homo sapiens
auuaaaauauacuuaaa

SEQ ID NO: 843 - RNA, 17 nt, Homo sapiens
uaaaauauacuuaaaaa

SEQ ID NO: 844 - RNA, 17 nt, Homo sapiens
acuuaaaaauuaauagu

SEQ ID NO: 845 - RNA, 17 nt, Homo sapiens
aaaaauuaauaguuuua

SEQ ID NO: 846 - RNA, 17 nt, Homo sapiens
aauuaauaguuuuaucu

SEQ ID NO: 847 - RNA, 17 nt, Homo sapiens
auaguuuuaucugggua

SEQ ID NO: 848 - RNA, 17 nt, Homo sapiens
uuaucuggguacaaaua

SEQ ID NO: 849 - RNA, 17 nt, Homo sapiens
aucuggguacaaauaaa

SEQ ID NO: 850 - RNA, 17 nt, Homo sapiens
ggguacaaauaaacagu

SEQ ID NO: 851 - RNA, 17 nt, Homo sapiens
acaaauaaacagugccu

SEQ ID NO: 852 - RNA, 17 nt, Homo sapiens
aauaaacagugccugaa

SEQ ID NO: 853 - RNA, 17 nt, Homo sapiens
uaaacagugccugaacu

SEQ ID NO: 854 - RNA, 17 nt, Homo sapiens
gugccugaacuaguuca

SEQ ID NO: 855 - RNA, 17 nt, Homo sapiens
cugaacuaguucacaga

SEQ ID NO: 856 - RNA, 17 nt, Homo sapiens
acuaguucacagacaag

SEQ ID NO: 857 - RNA, 17 nt, Homo sapiens
guucacagacaagggaa

SEQ ID NO: 858 - RNA, 17 nt, Homo sapiens
caagggaaacuucuaug

SEQ ID NO: 859 - RNA, 17 nt, Homo sapiens
aaacuucuauguaaaaa

SEQ ID NO: 860 - RNA, 17 nt, Homo sapiens
acuucuauguaaaaauc

SEQ ID NO: 861 - RNA, 17 nt, Homo sapiens
auguaaaaaucacuaug

SEQ ID NO: 862 - RNA, 17 nt, Homo sapiens
uaaaaaucacuaugauu

SEQ ID NO: 863 - RNA, 17 nt, Homo sapiens
aaaucacuaugauuucu

SEQ ID NO: 864 - RNA, 17 nt, Homo sapiens
ucacuaugauuucugaa

SEQ ID NO: 865 - RNA, 17 nt, Homo sapiens
auuucugaauugcuaug

SEQ ID NO: 866 - RNA, 17 nt, Homo sapiens
ucugaauugcuauguga

SEQ ID NO: 867 - RNA, 17 nt, Homo sapiens
gaauugcuaugugaaac

SEQ ID NO: 868 - RNA, 17 nt, Homo sapiens
auugcuaugugaaacua

SEQ ID NO: 869 - RNA, 17 nt, Homo sapiens
uaugugaaacuacagau

SEQ ID NO: 870 - RNA, 17 nt, Homo sapiens
gugaaacuacagaucuu

SEQ ID NO: 871 - RNA, 17 nt, Homo sapiens
aacuacagaucuuugga

SEQ ID NO: 872 - RNA, 17 nt, Homo sapiens
ucuuuggaacacuguuu

SEQ ID NO: 873 - RNA, 17 nt, Homo sapiens
uuuggaacacuguuuag

SEQ ID NO: 874 - RNA, 17 nt, Homo sapiens
ggaacacuguuuaggua

SEQ ID NO: 875 - RNA, 17 nt, Homo sapiens
cuguuuagguagggugu

SEQ ID NO: 876 - RNA, 17 nt, Homo sapiens
uagguaggguguuaaga

SEQ ID NO: 877 - RNA, 17 nt, Homo sapiens
gguaggguguuaagacu

SEQ ID NO: 878 - RNA, 17 nt, Homo sapiens
guguuaagacuugacac

SEQ ID NO: 879 - RNA, 17 nt, Homo sapiens
aagacuugacacaguac

SEQ ID NO: 880 - RNA, 17 nt, Homo sapiens
gacuugacacaguaccu

SEQ ID NO: 881 - RNA, 17 nt, Homo sapiens
uugacacaguaccucgu

SEQ ID NO: 882 - RNA, 17 nt, Homo sapiens
gacacaguaccucguuu

SEQ ID NO: 883 - RNA, 17 nt, Homo sapiens
aguaccucguuucuaca

SEQ ID NO: 884 - RNA, 17 nt, Homo sapiens
ucguuucuacacagaga

SEQ ID NO: 885 - RNA, 17 nt, Homo sapiens
guuucuacacagagaaa

SEQ ID NO: 886 - RNA, 17 nt, Homo sapiens
agaaagaaauggccaua

SEQ ID NO: 887 - RNA, 17 nt, Homo sapiens
aagaaauggccauacuu

SEQ ID NO: 888 - RNA, 17 nt, Homo sapiens
aaauggccauacuucag

SEQ ID NO: 889 - RNA, 17 nt, Homo sapiens
auggccauacuucagga

SEQ ID NO: 890 - RNA, 17 nt, Homo sapiens
cuucaggaacugcagug

SEQ ID NO: 891 - RNA, 17 nt, Homo sapiens
caggaacugcagugcuu

SEQ ID NO: 892 - RNA, 17 nt, Homo sapiens
gaacugcagugcuuaug

SEQ ID NO: 893 - RNA, 17 nt, Homo sapiens
acugcagugcuuaugag

SEQ ID NO: 894 - RNA, 17 nt, Homo sapiens
cagugcuuaugagggga

SEQ ID NO: 895 - RNA, 17 nt, Homo sapiens
augaggggauauuuagg

SEQ ID NO: 896 - RNA, 17 nt, Homo sapiens
gaggggauauuuaggcc

SEQ ID NO: 897 - RNA, 17 nt, Homo sapiens
auauuuaggccucuuga

SEQ ID NO: 898 - RNA, 17 nt, Homo sapiens
ccucuugaauuuuugau

SEQ ID NO: 899 - RNA, 17 nt, Homo sapiens
aauuuuugauguagaug

SEQ ID NO: 900 - RNA, 17 nt, Homo sapiens
uuuuugauguagauggg

SEQ ID NO: 901 - RNA, 17 nt, Homo sapiens
ugauguagaugggcauu

SEQ ID NO: 902 - RNA, 17 nt, Homo sapiens
guagaugggcauuuuuu

SEQ ID NO: 903 - RNA, 17 nt, Homo sapiens
agaugggcauuuuuuua

SEQ ID NO: 904 - RNA, 17 nt, Homo sapiens
uuuuuaagguagugguu

SEQ ID NO: 905 - RNA, 17 nt, Homo sapiens
uuaagguagugguuaau

SEQ ID NO: 906 - RNA, 17 nt, Homo sapiens
agguagugguuaauuac

SEQ ID NO: 907 - RNA, 17 nt, Homo sapiens
agugguuaauuaccuuu

SEQ ID NO: 908 - RNA, 17 nt, Homo sapiens
gguuaauuaccuuuaug

SEQ ID NO: 909 - RNA, 17 nt, Homo sapiens
uuaccuuuaugugaacu

SEQ ID NO: 910 - RNA, 17 nt, Homo sapiens
accuuuaugugaacuuu

SEQ ID NO: 911 - RNA, 17 nt, Homo sapiens
uuaugugaacuuugaau

SEQ ID NO: 912 - RNA, 17 nt, Homo sapiens
aacuuugaaugguuuaa

SEQ ID NO: 913 - RNA, 17 nt, Homo sapiens
uuugaaugguuuaacaa

SEQ ID NO: 914 - RNA, 17 nt, Homo sapiens
augguuuaacaaaagau

SEQ ID NO: 915 - RNA, 17 nt, Homo sapiens
aacaaaagauuuguuuu

SEQ ID NO: 916 - RNA, 17 nt, Homo sapiens
aaagauuuguuuuugua

SEQ ID NO: 917 - RNA, 17 nt, Homo sapiens
uuguuuuuguagagauu

SEQ ID NO: 918 - RNA, 17 nt, Homo sapiens
uuguagagauuuuaaag

SEQ ID NO: 919 - RNA, 17 nt, Homo sapiens
gggggagaauucuagaa

SEQ ID NO: 920 - RNA, 17 nt, Homo sapiens
uucuagaaauaaauguu

SEQ ID NO: 921 - RNA, 17 nt, Homo sapiens
agaaauaaauguuaccu

SEQ ID NO: 922 - RNA, 17 nt, Homo sapiens
aaauaaauguuaccuaa

SEQ ID NO: 923 - RNA, 17 nt, Homo sapiens
uaaauguuaccuaauua

SEQ ID NO: 924 - RNA, 17 nt, Homo sapiens
guuaccuaauuauuaca

SEQ ID NO: 925 - RNA, 17 nt, Homo sapiens
accuaauuauuacagcc

SEQ ID NO: 926 - RNA, 17 nt, Homo sapiens
uaauuauuacagccuua

SEQ ID NO: 927 - RNA, 17 nt, Homo sapiens
uuauuacagccuuaaag

SEQ ID NO: 928 - RNA, 17 nt, Homo sapiens
ccuuaaagacaaaaauc

SEQ ID NO: 929 - RNA, 17 nt, Homo sapiens
agacaaaaauccuuguu

SEQ ID NO: 930 - RNA, 17 nt, Homo sapiens
aaauccuuguugaaguu

SEQ ID NO: 931 - RNA, 17 nt, Homo sapiens
uuguugaaguuuuuuua

SEQ ID NO: 932 - RNA, 17 nt, Homo sapiens
aaaaaaagacuaaauua

SEQ ID NO: 933 - RNA, 17 nt, Homo sapiens
aagacuaaauuacauag

SEQ ID NO: 934 - RNA, 17 nt, Homo sapiens
acuaaauuacauagacu

SEQ ID NO: 935 - RNA, 17 nt, Homo sapiens
uaaauuacauagacuua

SEQ ID NO: 936 - RNA, 17 nt, Homo sapiens
uuacauagacuuaggca

SEQ ID NO: 937 - RNA, 17 nt, Homo sapiens
agacuuaggcauuaaca

SEQ ID NO: 938 - RNA, 17 nt, Homo sapiens
acuuaggcauuaacaug

SEQ ID NO: 939 - RNA, 17 nt, Homo sapiens
aggcauuaacauguuug

SEQ ID NO: 940 - RNA, 17 nt, Homo sapiens
gcauuaacauguuugug

SEQ ID NO: 941 - RNA, 17 nt, Homo sapiens
auuaacauguuugugga

SEQ ID NO: 942 - RNA, 17 nt, Homo sapiens
acauguuuguggaagaa

SEQ ID NO: 943 - RNA, 17 nt, Homo sapiens
guggaagaauauagcag

SEQ ID NO: 944 - RNA, 17 nt, Homo sapiens
ggaagaauauagcagac

SEQ ID NO: 945 - RNA, 17 nt, Homo sapiens
agaauauagcagacgua

SEQ ID NO: 946 - RNA, 17 nt, Homo sapiens
uauagcagacguauauu

SEQ ID NO: 947 - RNA, 17 nt, Homo sapiens
uagcagacguauauugu

SEQ ID NO: 948 - RNA, 17 nt, Homo sapiens
gcagacguauauuguau

SEQ ID NO: 949 - RNA, 17 nt, Homo sapiens
agacguauauuguauca

SEQ ID NO: 950 - RNA, 17 nt, Homo sapiens
cguauauuguaucauuu

SEQ ID NO: 951 - RNA, 17 nt, Homo sapiens
uauauuguaucauuuga

SEQ ID NO: 952 - RNA, 17 nt, Homo sapiens
auuguaucauuugagug

SEQ ID NO: 953 - RNA, 17 nt, Homo sapiens
ucauuugagugaauguu

SEQ ID NO: 954 - RNA, 17 nt, Homo sapiens
uugagugaauguuccca

SEQ ID NO: 955 - RNA, 17 nt, Homo sapiens
gagugaauguucccaag

SEQ ID NO: 956 - RNA, 17 nt, Homo sapiens
guucccaaguaggcauu

SEQ ID NO: 957 - RNA, 17 nt, Homo sapiens
ccaaguaggcauucuag

SEQ ID NO: 958 - RNA, 17 nt, Homo sapiens
aaguaggcauucuaggc

SEQ ID NO: 959 - RNA, 17 nt, Homo sapiens
cauucuaggcucuauuu

SEQ ID NO: 960 - RNA, 17 nt, Homo sapiens
uaggcucuauuuaacug

SEQ ID NO: 961 - RNA, 17 nt, Homo sapiens
ucuauuuaacugaguca

SEQ ID NO: 962 - RNA, 17 nt, Homo sapiens
uuaacugagucacacug

SEQ ID NO: 963 - RNA, 17 nt, Homo sapiens
acugagucacacugcau

SEQ ID NO: 964 - RNA, 17 nt, Homo sapiens
ugagucacacugcauag

SEQ ID NO: 965 - RNA, 17 nt, Homo sapiens
gucacacugcauaggaa

SEQ ID NO: 966 - RNA, 17 nt, Homo sapiens
cacacugcauaggaauu

SEQ ID NO: 967 - RNA, 17 nt, Homo sapiens
gcauaggaauuuagaac

SEQ ID NO: 968 - RNA, 17 nt, Homo sapiens
aauuuagaaccuaacuu

SEQ ID NO: 969 - RNA, 17 nt, Homo sapiens
agaaccuaacuuuuaua

SEQ ID NO: 970 - RNA, 17 nt, Homo sapiens
uaacuuuuauagguuau

SEQ ID NO: 971 - RNA, 17 nt, Homo sapiens
uuuuauagguuaucaaa

SEQ ID NO: 972 - RNA, 17 nt, Homo sapiens
uauagguuaucaaaacu

SEQ ID NO: 973 - RNA, 17 nt, Homo sapiens
uuaucaaaacuguuguc

SEQ ID NO: 974 - RNA, 17 nt, Homo sapiens
ucaaaacuguugucacc

SEQ ID NO: 975 - RNA, 17 nt, Homo sapiens
aaacuguugucaccauu

SEQ ID NO: 976 - RNA, 17 nt, Homo sapiens
cuguugucaccauugca

SEQ ID NO: 977 - RNA, 17 nt, Homo sapiens
uugucaccauugcacaa

SEQ ID NO: 978 - RNA, 17 nt, Homo sapiens
ucaccauugcacaauuu

SEQ ID NO: 979 - RNA, 17 nt, Homo sapiens
accauugcacaauuuug

SEQ ID NO: 980 - RNA, 17 nt, Homo sapiens
auugcacaauuuugucc

SEQ ID NO: 981 - RNA, 17 nt, Homo sapiens
acaauuuuguccuaaua

SEQ ID NO: 982 - RNA, 17 nt, Homo sapiens
uuguccuaauauauaca

SEQ ID NO: 983 - RNA, 17 nt, Homo sapiens
guccuaauauauacaua

SEQ ID NO: 984 - RNA, 17 nt, Homo sapiens
ccuaauauauacauaga

SEQ ID NO: 985 - RNA, 17 nt, Homo sapiens
uaauauauacauagaaa

SEQ ID NO: 986 - RNA, 17 nt, Homo sapiens
auauauacauagaaacu

SEQ ID NO: 987 - RNA, 17 nt, Homo sapiens
acauagaaacuuugugg

SEQ ID NO: 988 - RNA, 17 nt, Homo sapiens
gaaacuuuguggggcau

SEQ ID NO: 989 - RNA, 17 nt, Homo sapiens
uuuguggggcauguuaa

SEQ ID NO: 990 - RNA, 17 nt, Homo sapiens
uguggggcauguuaagu

SEQ ID NO: 991 - RNA, 17 nt, Homo sapiens
uggggcauguuaaguua

SEQ ID NO: 992 - RNA, 17 nt, Homo sapiens
cauguuaaguuacaguu

SEQ ID NO: 993 - RNA, 17 nt, Homo sapiens
guuaaguuacaguuugc

SEQ ID NO: 994 - RNA, 17 nt, Homo sapiens
aaguuacaguuugcaca

SEQ ID NO: 995 - RNA, 17 nt, Homo sapiens
uacaguuugcacaaguu

SEQ ID NO: 996 - RNA, 17 nt, Homo sapiens
caguuugcacaaguuca

SEQ ID NO: 997 - RNA, 17 nt, Homo sapiens
uugcacaaguucaucuc

SEQ ID NO: 998 - RNA, 17 nt, Homo sapiens
acaaguucaucucauuu

SEQ ID NO: 999 - RNA, 17 nt, Homo sapiens
uucaucucauuuguauu

SEQ ID NO: 1000 - RNA, 17 nt, Homo sapiens
ucucauuuguauuccau

SEQ ID NO: 1001 - RNA, 17 nt, Homo sapiens
ucauuuguauuccauug

SEQ ID NO: 1002 - RNA, 17 nt, Homo sapiens
uguauuccauugauuuu

SEQ ID NO: 1003 - RNA, 17 nt, Homo sapiens
uuccauugauuuuuuuu

SEQ ID NO: 1004 - RNA, 17 nt, Homo sapiens
ucuucuaaacauuuuuu

SEQ ID NO: 1005 - RNA, 17 nt, Homo sapiens
uucuaaacauuuuuucu

SEQ ID NO: 1006 - RNA, 17 nt, Homo sapiens
ucuucaaaacaguauau

SEQ ID NO: 1007 - RNA, 17 nt, Homo sapiens
ucaaaacaguauauaua

SEQ ID NO: 1008 - RNA, 17 nt, Homo sapiens
aaaacaguauauauaac

SEQ ID NO: 1009 - RNA, 17 nt, Homo sapiens
aacaguauauauaacuu

SEQ ID NO: 1010 - RNA, 17 nt, Homo sapiens
caguauauauaacuuuu

SEQ ID NO: 1011 - RNA, 17 nt, Homo sapiens
uauauauaacuuuuuuu

SEQ ID NO: 1012 - RNA, 17 nt, Homo sapiens
uuuaggggauuuuuuuu

SEQ ID NO: 1013 - RNA, 17 nt, Homo sapiens
uuuuuuagacagcaaaa

SEQ ID NO: 1014 - RNA, 17 nt, Homo sapiens
uuuagacagcaaaaaac

SEQ ID NO: 1015 - RNA, 17 nt, Homo sapiens
agcaaaaaacuaucuga

SEQ ID NO: 1016 - RNA, 17 nt, Homo sapiens
aaaaaacuaucugaaga

SEQ ID NO: 1017 - RNA, 17 nt, Homo sapiens
aucugaagauuuccauu

SEQ ID NO: 1018 - RNA, 17 nt, Homo sapiens
agauuuccauuugucaa

SEQ ID NO: 1019 - RNA, 17 nt, Homo sapiens
uuccauuugucaaaaag

SEQ ID NO: 1020 - RNA, 17 nt, Homo sapiens
gucaaaaaguaaugauu

SEQ ID NO: 1021 - RNA, 17 nt, Homo sapiens
aaaaaguaaugauuucu

SEQ ID NO: 1022 - RNA, 17 nt, Homo sapiens
aaguaaugauuucuuga

SEQ ID NO: 1023 - RNA, 17 nt, Homo sapiens
auuucuugauaauugug

SEQ ID NO: 1024 - RNA, 17 nt, Homo sapiens
ucuugauaauuguguag

SEQ ID NO: 1025 - RNA, 17 nt, Homo sapiens
ugauaauuguguaguga

SEQ ID NO: 1026 - RNA, 17 nt, Homo sapiens
auaauuguguagugaau

SEQ ID NO: 1027 - RNA, 17 nt, Homo sapiens
auuguguagugaauguu

SEQ ID NO: 1028 - RNA, 17 nt, Homo sapiens
uguagugaauguuuuuu

SEQ ID NO: 1029 - RNA, 17 nt, Homo sapiens
uagugaauguuuuuuag

SEQ ID NO: 1030 - RNA, 17 nt, Homo sapiens
uuuuuagaacccagcag

SEQ ID NO: 1031 - RNA, 17 nt, Homo sapiens
agaacccagcaguuacc

SEQ ID NO: 1032 - RNA, 17 nt, Homo sapiens
acccagcaguuaccuug

SEQ ID NO: 1033 - RNA, 17 nt, Homo sapiens
cagcaguuaccuugaaa

SEQ ID NO: 1034 - RNA, 17 nt, Homo sapiens
ccuugaaagcugaauuu

SEQ ID NO: 1035 - RNA, 17 nt, Homo sapiens
aaagcugaauuuauauu

SEQ ID NO: 1036 - RNA, 17 nt, Homo sapiens
cugaauuuauauuuagu

SEQ ID NO: 1037 - RNA, 17 nt, Homo sapiens
gaauuuauauuuaguaa

SEQ ID NO: 1038 - RNA, 17 nt, Homo sapiens
uauauuuaguaacuucu

SEQ ID NO: 1039 - RNA, 17 nt, Homo sapiens
auuuaguaacuucugug

SEQ ID NO: 1040 - RNA, 17 nt, Homo sapiens
uaacuucuguguuaaua

SEQ ID NO: 1041 - RNA, 17 nt, Homo sapiens
acuucuguguuaauacu

SEQ ID NO: 1042 - RNA, 17 nt, Homo sapiens
cuguguuaauacuggau

SEQ ID NO: 1043 - RNA, 17 nt, Homo sapiens
guguuaauacuggauag

SEQ ID NO: 1044 - RNA, 17 nt, Homo sapiens
aauacuggauagcauga

SEQ ID NO: 1045 - RNA, 17 nt, Homo sapiens
acuggauagcaugaauu

SEQ ID NO: 1046 - RNA, 17 nt, Homo sapiens
uggauagcaugaauucu

SEQ ID NO: 1047 - RNA, 17 nt, Homo sapiens
uagcaugaauucugcau

SEQ ID NO: 1048 - RNA, 17 nt, Homo sapiens
ugaauucugcauugaga

SEQ ID NO: 1049 - RNA, 17 nt, Homo sapiens
aauucugcauugagaaa

SEQ ID NO: 1050 - RNA, 17 nt, Homo sapiens
auugagaaacugaauag

SEQ ID NO: 1051 - RNA, 17 nt, Homo sapiens
gaaacugaauagcuguc

SEQ ID NO: 1052 - RNA, 17 nt, Homo sapiens
acugaauagcugucaua

SEQ ID NO: 1053 - RNA, 17 nt, Homo sapiens
gaauagcugucauaaaa

SEQ ID NO: 1054 - RNA, 17 nt, Homo sapiens
uagcugucauaaaaugc

SEQ ID NO: 1055 - RNA, 17 nt, Homo sapiens
gucauaaaaugcuuucu

SEQ ID NO: 1056 - RNA, 17 nt, Homo sapiens
cauaaaaugcuuucuuu

SEQ ID NO: 1057 - RNA, 17 nt, Homo sapiens
aaagaaagauacucaca

SEQ ID NO: 1058 - RNA, 17 nt, Homo sapiens
agaaagauacucacaug

SEQ ID NO: 1059 - RNA, 17 nt, Homo sapiens
agauacucacaugaguu

SEQ ID NO: 1060 - RNA, 17 nt, Homo sapiens
auacucacaugaguucu

SEQ ID NO: 1061 - RNA, 17 nt, Homo sapiens
ucacaugaguucuugaa

SEQ ID NO: 1062 - RNA, 17 nt, Homo sapiens
cuugaagaauagucaua

SEQ ID NO: 1063 - RNA, 17 nt, Homo sapiens
gaagaauagucauaacu

SEQ ID NO: 1064 - RNA, 17 nt, Homo sapiens
gaauagucauaacuaga

SEQ ID NO: 1065 - RNA, 17 nt, Homo sapiens
uagucauaacuagauua

SEQ ID NO: 1066 - RNA, 17 nt, Homo sapiens
auaacuagauuaagauc

SEQ ID NO: 1067 - RNA, 17 nt, Homo sapiens
agauuaagaucuguguu

SEQ ID NO: 1068 - RNA, 17 nt, Homo sapiens
uaagaucuguguuuuag

SEQ ID NO: 1069 - RNA, 17 nt, Homo sapiens
agaucuguguuuuaguu

SEQ ID NO: 1070 - RNA, 17 nt, Homo sapiens
guguuuuaguuuaauag

SEQ ID NO: 1071 - RNA, 17 nt, Homo sapiens
uuaguuuaauaguuuga

SEQ ID NO: 1072 - RNA, 17 nt, Homo sapiens
guuuaauaguuugaagu

SEQ ID NO: 1073 - RNA, 17 nt, Homo sapiens
aguuugaagugccuguu

SEQ ID NO: 1074 - RNA, 17 nt, Homo sapiens
uuugaagugccuguuug

SEQ ID NO: 1075 - RNA, 17 nt, Homo sapiens
aagugccuguuugggau

SEQ ID NO: 1076 - RNA, 17 nt, Homo sapiens
uguuugggauaaugaua

SEQ ID NO: 1077 - RNA, 17 nt, Homo sapiens
uugggauaaugauaggu

SEQ ID NO: 1078 - RNA, 17 nt, Homo sapiens
ggauaaugauagguaau

SEQ ID NO: 1079 - RNA, 17 nt, Homo sapiens
aaugauagguaauuuag

SEQ ID NO: 1080 - RNA, 17 nt, Homo sapiens
gauagguaauuuagaug

SEQ ID NO: 1081 - RNA, 17 nt, Homo sapiens
uaauuuagaugaauuua

SEQ ID NO: 1082 - RNA, 17 nt, Homo sapiens
uuagaugaauuuagggg

SEQ ID NO: 1083 - RNA, 17 nt, Homo sapiens
aaaaaaaaguuaucugc

SEQ ID NO: 1084 - RNA, 17 nt, Homo sapiens
aaaaaguuaucugcagu

SEQ ID NO: 1085 - RNA, 17 nt, Homo sapiens
aguuaucugcaguuaug

SEQ ID NO: 1086 - RNA, 17 nt, Homo sapiens
uaucugcaguuauguug

SEQ ID NO: 1087 - RNA, 17 nt, Homo sapiens
cugcaguuauguugagg

SEQ ID NO: 1088 - RNA, 17 nt, Homo sapiens
gcaguuauguugagggc

SEQ ID NO: 1089 - RNA, 17 nt, Homo sapiens
uguugagggcccaucuc

SEQ ID NO: 1090 - RNA, 17 nt, Homo sapiens
gagggcccaucucuccc

SEQ ID NO: 1091 - RNA, 17 nt, Homo sapiens
cuccccccacaccccca

SEQ ID NO: 1092 - RNA, 17 nt, Homo sapiens
ccccccacacccccaca

SEQ ID NO: 1093 - RNA, 17 nt, Homo sapiens
acacccccacagagcua

SEQ ID NO: 1094 - RNA, 17 nt, Homo sapiens
cccacagagcuaacugg

SEQ ID NO: 1095 - RNA, 17 nt, Homo sapiens
cagagcuaacuggguua

SEQ ID NO: 1096 - RNA, 17 nt, Homo sapiens
cuaacuggguuacagug

SEQ ID NO: 1097 - RNA, 17 nt, Homo sapiens
acuggguuacaguguuu

SEQ ID NO: 1098 - RNA, 17 nt, Homo sapiens
ggguuacaguguuuuau

SEQ ID NO: 1099 - RNA, 17 nt, Homo sapiens
guuacaguguuuuaucc

SEQ ID NO: 1100 - RNA, 17 nt, Homo sapiens
aguguuuuauccgaaag

SEQ ID NO: 1101 - RNA, 17 nt, Homo sapiens
auccgaaaguuuccaau

SEQ ID NO: 1102 - RNA, 17 nt, Homo sapiens
aguuuccaauuccacug

SEQ ID NO: 1103 - RNA, 17 nt, Homo sapiens
ccaauuccacugucuug

SEQ ID NO: 1104 - RNA, 17 nt, Homo sapiens
auuccacugucuugugu

SEQ ID NO: 1105 - RNA, 17 nt, Homo sapiens
acugucuuguguuuuca

SEQ ID NO: 1106 - RNA, 17 nt, Homo sapiens
ugucuuguguuuucaug

SEQ ID NO: 1107 - RNA, 17 nt, Homo sapiens
guguuuucauguugaaa

SEQ ID NO: 1108 - RNA, 17 nt, Homo sapiens
guuuucauguugaaaau

SEQ ID NO: 1109 - RNA, 17 nt, Homo sapiens
uguugaaaauacuuuug

SEQ ID NO: 1110 - RNA, 17 nt, Homo sapiens
uugaaaauacuuuugca

SEQ ID NO: 1111 - RNA, 17 nt, Homo sapiens
auacuuuugcauuuuuc

SEQ ID NO: 1112 - RNA, 17 nt, Homo sapiens
acuuuugcauuuuuccu

SEQ ID NO: 1113 - RNA, 17 nt, Homo sapiens
uccuuugagugccaauu

SEQ ID NO: 1114 - RNA, 17 nt, Homo sapiens
cuuugagugccaauuuc

SEQ ID NO: 1115 - RNA, 17 nt, Homo sapiens
gagugccaauuucuuac

SEQ ID NO: 1116 - RNA, 17 nt, Homo sapiens
aauuucuuacuaguacu

SEQ ID NO: 1117 - RNA, 17 nt, Homo sapiens
ucuuacuaguacuauuu

SEQ ID NO: 1118 - RNA, 17 nt, Homo sapiens
uuacuaguacuauuucu

SEQ ID NO: 1119 - RNA, 17 nt, Homo sapiens
cuaguacuauuucuuaa

SEQ ID NO: 1120 - RNA, 17 nt, Homo sapiens
auuucuuaauguaacau

SEQ ID NO: 1121 - RNA, 17 nt, Homo sapiens
uucuuaauguaacaugu

SEQ ID NO: 1122 - RNA, 17 nt, Homo sapiens
uuaauguaacauguuua

SEQ ID NO: 1123 - RNA, 17 nt, Homo sapiens
aauguaacauguuuacc

SEQ ID NO: 1124 - RNA, 17 nt, Homo sapiens
uguaacauguuuaccug

SEQ ID NO: 1125 - RNA, 17 nt, Homo sapiens
acauguuuaccuggccu

SEQ ID NO: 1126 - RNA, 17 nt, Homo sapiens
uuuaccuggccugucuu

SEQ ID NO: 1127 - RNA, 17 nt, Homo sapiens
ccuggccugucuuuuaa

SEQ ID NO: 1128 - RNA, 17 nt, Homo sapiens
gucuuuuaacuauuuuu

SEQ ID NO: 1129 - RNA, 17 nt, Homo sapiens
uuuuaacuauuuuugua

SEQ ID NO: 1130 - RNA, 17 nt, Homo sapiens
cuauuuuuguauagugu

SEQ ID NO: 1131 - RNA, 17 nt, Homo sapiens
auuuuuguauaguguaa

SEQ ID NO: 1132 - RNA, 17 nt, Homo sapiens
uuuguauaguguaaacu

SEQ ID NO: 1133 - RNA, 17 nt, Homo sapiens
uguauaguguaaacuga

SEQ ID NO: 1134 - RNA, 17 nt, Homo sapiens
uaguguaaacugaaaca

SEQ ID NO: 1135 - RNA, 17 nt, Homo sapiens
aaacugaaacaugcaca

SEQ ID NO: 1136 - RNA, 17 nt, Homo sapiens
acugaaacaugcacauu

SEQ ID NO: 1137 - RNA, 17 nt, Homo sapiens
ugaaacaugcacauuuu

SEQ ID NO: 1138 - RNA, 17 nt, Homo sapiens
aaacaugcacauuuugu

SEQ ID NO: 1139 - RNA, 17 nt, Homo sapiens
acaugcacauuuuguac

SEQ ID NO: 1140 - RNA, 17 nt, Homo sapiens
cacauuuuguacauugu

SEQ ID NO: 1141 - RNA, 17 nt, Homo sapiens
cauuuuguacauugugc

SEQ ID NO: 1142 - RNA, 17 nt, Homo sapiens
uuuuguacauugugcuu

SEQ ID NO: 1143 - RNA, 17 nt, Homo sapiens
uguacauugugcuuucu

SEQ ID NO: 1144 - RNA, 17 nt, Homo sapiens
uacauugugcuuucuuu

SEQ ID NO: 1145 - RNA, 17 nt, Homo sapiens
uuucuuuugugggucau

SEQ ID NO: 1146 - RNA, 17 nt, Homo sapiens
uuuugugggucauaugc

SEQ ID NO: 1147 - RNA, 17 nt, Homo sapiens
ugugggucauaugcagu

SEQ ID NO: 1148 - RNA, 17 nt, Homo sapiens
ugggucauaugcagugu

SEQ ID NO: 1149 - RNA, 17 nt, Homo sapiens
ggucauaugcaguguga

SEQ ID NO: 1150 - RNA, 17 nt, Homo sapiens
cauaugcagugugaucc

SEQ ID NO: 1151 - RNA, 17 nt, Homo sapiens
uaugcagugugauccag

SEQ ID NO: 1152 - RNA, 17 nt, Homo sapiens
gcagugugauccaguug

SEQ ID NO: 1153 - RNA, 17 nt, Homo sapiens
gugauccaguuguuuuc

SEQ ID NO: 1154 - RNA, 17 nt, Homo sapiens
auccaguuguuuuccau

SEQ ID NO: 1155 - RNA, 17 nt, Homo sapiens
uguuuuccaucauuugg

SEQ ID NO: 1156 - RNA, 17 nt, Homo sapiens
uuuccaucauuugguug

SEQ ID NO: 1157 - RNA, 17 nt, Homo sapiens
aucauuugguugcgcug

SEQ ID NO: 1158 - RNA, 17 nt, Homo sapiens
auuugguugcgcugacc

SEQ ID NO: 1159 - RNA, 17 nt, Homo sapiens
uugguugcgcugaccua

SEQ ID NO: 1160 - RNA, 17 nt, Homo sapiens
uugcgcugaccuaggaa

SEQ ID NO: 1161 - RNA, 17 nt, Homo sapiens
accuaggaauguugguc

SEQ ID NO: 1162 - RNA, 17 nt, Homo sapiens
cuaggaauguuggucau

SEQ ID NO: 1163 - RNA, 17 nt, Homo sapiens
gaauguuggucauauca

SEQ ID NO: 1164 - RNA, 17 nt, Homo sapiens
uguuggucauaucaaac

SEQ ID NO: 1165 - RNA, 17 nt, Homo sapiens
uuggucauaucaaacau

SEQ ID NO: 1166 - RNA, 17 nt, Homo sapiens
cauaucaaacauuaaaa

SEQ ID NO: 1167 - RNA, 17 nt, Homo sapiens
uaucaaacauuaaaaau

SEQ ID NO: 1168 - RNA, 17 nt, Homo sapiens
cauuaaaaaugaccacu

SEQ ID NO: 1169 - RNA, 17 nt, Homo sapiens
uaaaaaugaccacucuu

SEQ ID NO: 1170 - RNA, 17 nt, Homo sapiens
aaaugaccacucuuuua

SEQ ID NO: 1171 - RNA, 17 nt, Homo sapiens
cucuuuuaaugaaauua

SEQ ID NO: 1172 - RNA, 17 nt, Homo sapiens
uuaaugaaauuaacuuu

SEQ ID NO: 1173 - RNA, 17 nt, Homo sapiens
ugaaauuaacuuuuaaa

SEQ ID NO: 1174 - RNA, 17 nt, Homo sapiens
acuuuuaaauguuuaua

SEQ ID NO: 1175 - RNA, 17 nt, Homo sapiens
uuuuaaauguuuauagg

SEQ ID NO: 1176 - RNA, 17 nt, Homo sapiens
aaauguuuauaggagua

SEQ ID NO: 1177 - RNA, 17 nt, Homo sapiens
uuauaggaguaugugcu

SEQ ID NO: 1178 - RNA, 17 nt, Homo sapiens
auaggaguaugugcugu

SEQ ID NO: 1179 - RNA, 17 nt, Homo sapiens
aggaguaugugcuguga

SEQ ID NO: 1180 - RNA, 17 nt, Homo sapiens
gaguaugugcugugaag

SEQ ID NO: 1181 - RNA, 17 nt, Homo sapiens
uaugugcugugaaguga

SEQ ID NO: 1182 - RNA, 17 nt, Homo sapiens
gcugugaagugaucuaa

SEQ ID NO: 1183 - RNA, 17 nt, Homo sapiens
gugaagugaucuaaaau

SEQ ID NO: 1184 - RNA, 17 nt, Homo sapiens
gaucuaaaauuuguaau

SEQ ID NO: 1185 - RNA, 17 nt, Homo sapiens
uaaaauuuguaauauuu

SEQ ID NO: 1186 - RNA, 17 nt, Homo sapiens
aauuuguaauauuuuug

SEQ ID NO: 1187 - RNA, 17 nt, Homo sapiens
uuuguaauauuuuuguc

SEQ ID NO: 1188 - RNA, 17 nt, Homo sapiens
auauuuuugucaugaac

SEQ ID NO: 1189 - RNA, 17 nt, Homo sapiens
uuuuugucaugaacugu

SEQ ID NO: 1190 - RNA, 17 nt, Homo sapiens
ugucaugaacuguacua

SEQ ID NO: 1191 - RNA, 17 nt, Homo sapiens
caugaacuguacuacuc

SEQ ID NO: 1192 - RNA, 17 nt, Homo sapiens
ugaacuguacuacuccu

SEQ ID NO: 1193 - RNA, 17 nt, Homo sapiens
acuguacuacuccuaau

SEQ ID NO: 1194 - RNA, 17 nt, Homo sapiens
uacuccuaauuauugua

SEQ ID NO: 1195 - RNA, 17 nt, Homo sapiens
uccuaauuauuguaaug

SEQ ID NO: 1196 - RNA, 17 nt, Homo sapiens
uaauuauuguaauguaa

SEQ ID NO: 1197 - RNA, 17 nt, Homo sapiens
uuauuguaauguaauaa

SEQ ID NO: 1198 - RNA, 17 nt, Homo sapiens
auuguaauguaauaaaa

SEQ ID NO: 1199 - RNA, 17 nt, Homo sapiens
guaauguaauaaaaaua

SEQ ID NO: 1200 - RNA, 17 nt, Homo sapiens
uaauaaaaauaguuaca

SEQ ID NO: 1201 - RNA, 17 nt, Homo sapiens
uaaaaauaguuacagug

SEQ ID NO: 1202 - RNA, 17 nt, Homo sapiens
aaauaguuacagugacu

SEQ ID NO: 1203 - RNA, 17 nt, Homo sapiens
uaguuacagugacuaug

SEQ ID NO: 1204 - RNA, 17 nt, Homo sapiens
uuacagugacuaugagu

SEQ ID NO: 1205 - RNA, 17 nt, Homo sapiens
cagugacuaugagugug

SEQ ID NO: 1206 - RNA, 17 nt, Homo sapiens
gacuaugaguguguauu

SEQ ID NO: 1207 - RNA, 17 nt, Homo sapiens
cuaugaguguguauuua

SEQ ID NO: 1208 - RNA, 17 nt, Homo sapiens
augaguguguauuuauu

SEQ ID NO: 1209 - RNA, 17 nt, Homo sapiens
gaguguguauuuauuca

SEQ ID NO: 1210 - RNA, 17 nt, Homo sapiens
guguauuuauucaugca

SEQ ID NO: 1211 - RNA, 17 nt, Homo sapiens
auuuauucaugcaaauu

SEQ ID NO: 1212 - RNA, 17 nt, Homo sapiens
uuauucaugcaaauuug

SEQ ID NO: 1213 - RNA, 17 nt, Homo sapiens
ucaugcaaauuugaacu

SEQ ID NO: 1214 - RNA, 17 nt, Homo sapiens
aaauuugaacuguuugc

SEQ ID NO: 1215 - RNA, 17 nt, Homo sapiens
uuugaacuguuugcccc

SEQ ID NO: 1216 - RNA, 17 nt, Homo sapiens
aacuguuugccccgaaa

SEQ ID NO: 1217 - RNA, 17 nt, Homo sapiens
gccccgaaauggauaug

SEQ ID NO: 1218 - RNA, 17 nt, Homo sapiens
cgaaauggauauggaua

SEQ ID NO: 1219 - RNA, 17 nt, Homo sapiens
aaauggauauggauacu

SEQ ID NO: 1220 - RNA, 17 nt, Homo sapiens
ggauauggauacuuuau

SEQ ID NO: 1221 - RNA, 17 nt, Homo sapiens
auauggauacuuuauaa

SEQ ID NO: 1222 - RNA, 17 nt, Homo sapiens
gauacuuuauaagccau

SEQ ID NO: 1223 - RNA, 17 nt, Homo sapiens
cuuuauaagccauagac

SEQ ID NO: 1224 - RNA, 17 nt, Homo sapiens
uauaagccauagacacu

SEQ ID NO: 1225 - RNA, 17 nt, Homo sapiens
agccauagacacuauag

SEQ ID NO: 1226 - RNA, 17 nt, Homo sapiens
ccauagacacuauagua

SEQ ID NO: 1227 - RNA, 17 nt, Homo sapiens
uagacacuauaguauac

SEQ ID NO: 1228 - RNA, 17 nt, Homo sapiens
acacuauaguauaccag

SEQ ID NO: 1229 - RNA, 17 nt, Homo sapiens
acuauaguauaccagug

SEQ ID NO: 1230 - RNA, 17 nt, Homo sapiens
uauaguauaccagugaa

SEQ ID NO: 1231 - RNA, 17 nt, Homo sapiens
guauaccagugaaucuu

SEQ ID NO: 1232 - RNA, 17 nt, Homo sapiens
accagugaaucuuuuau

SEQ ID NO: 1233 - RNA, 17 nt, Homo sapiens
aaucuuuuaugcagcuu

SEQ ID NO: 1234 - RNA, 17 nt, Homo sapiens
ucuuuuaugcagcuugu

SEQ ID NO: 1235 - RNA, 17 nt, Homo sapiens
uuuaugcagcuuguuag

SEQ ID NO: 1236 - RNA, 17 nt, Homo sapiens
ugcagcuuguuagaagu

SEQ ID NO: 1237 - RNA, 17 nt, Homo sapiens
uguuagaaguauccuuu

SEQ ID NO: 1238 - RNA, 17 nt, Homo sapiens
uuagaaguauccuuuua

SEQ ID NO: 1239 - RNA, 17 nt, Homo sapiens
auccuuuuauuuucuaa

SEQ ID NO: 1240 - RNA, 17 nt, Homo sapiens
ucuaaaaggugcugugg

SEQ ID NO: 1241 - RNA, 17 nt, Homo sapiens
uaaaaggugcuguggau

SEQ ID NO: 1242 - RNA, 17 nt, Homo sapiens
aaggugcuguggauauu

SEQ ID NO: 1243 - RNA, 17 nt, Homo sapiens
ugcuguggauauuaugu

SEQ ID NO: 1244 - RNA, 17 nt, Homo sapiens
cuguggauauuauguaa

SEQ ID NO: 1245 - RNA, 17 nt, Homo sapiens
uggauauuauguaaagg

SEQ ID NO: 1246 - RNA, 17 nt, Homo sapiens
gauauuauguaaaggcg

SEQ ID NO: 1247 - RNA, 17 nt, Homo sapiens
auguaaaggcguguuug

SEQ ID NO: 1248 - RNA, 17 nt, Homo sapiens
guaaaggcguguuugcu

SEQ ID NO: 1249 - RNA, 17 nt, Homo sapiens
aaaggcguguuugcuua

SEQ ID NO: 1250 - RNA, 17 nt, Homo sapiens
gcguguuugcuuaaaca

SEQ ID NO: 1251 - RNA, 17 nt, Homo sapiens
uugcuuaaacaauuuuc

SEQ ID NO: 1252 - RNA, 17 nt, Homo sapiens
cuuaaacaauuuuccau

SEQ ID NO: 1253 - RNA, 17 nt, Homo sapiens
aauuuuccauauuuaga

SEQ ID NO: 1254 - RNA, 17 nt, Homo sapiens
uuuuccauauuuagaag

SEQ ID NO: 1255 - RNA, 17 nt, Homo sapiens
auuuagaaguagaugca

SEQ ID NO: 1256 - RNA, 17 nt, Homo sapiens
agaaguagaugcaaaac

SEQ ID NO: 1257 - RNA, 17 nt, Homo sapiens
aaguagaugcaaaacaa

SEQ ID NO: 1258 - RNA, 17 nt, Homo sapiens
gaugcaaaacaaaucug

SEQ ID NO: 1259 - RNA, 17 nt, Homo sapiens
caaaacaaaucugccuu

SEQ ID NO: 1260 - RNA, 17 nt, Homo sapiens
acaaaucugccuuuaug

SEQ ID NO: 1261 - RNA, 17 nt, Homo sapiens
cugccuuuaugacaaaa

SEQ ID NO: 1262 - RNA, 17 nt, Homo sapiens
ccuuuaugacaaaaaaa

SEQ ID NO: 1263 - RNA, 17 nt, Homo sapiens
acaaaaaaauaggauaa

SEQ ID NO: 1264 - RNA, 17 nt, Homo sapiens
aaaauaggauaacauua

SEQ ID NO: 1265 - RNA, 17 nt, Homo sapiens
auaggauaacauuauuu

SEQ ID NO: 1266 - RNA, 17 nt, Homo sapiens
aggauaacauuauuuau

SEQ ID NO: 1267 - RNA, 17 nt, Homo sapiens
auaacauuauuuauuua

SEQ ID NO: 1268 - RNA, 17 nt, Homo sapiens
cauuauuuauuuauuuc

SEQ ID NO: 1269 - RNA, 17 nt, Homo sapiens
auuuauuuauuuccuuu

SEQ ID NO: 1270 - RNA, 17 nt, Homo sapiens
uuccuuuuaucaauaag

SEQ ID NO: 1271 - RNA, 17 nt, Homo sapiens
uuuuaucaauaagguaa

SEQ ID NO: 1272 - RNA, 17 nt, Homo sapiens
ucaauaagguaauugau

SEQ ID NO: 1273 - RNA, 17 nt, Homo sapiens
auaagguaauugauaca

SEQ ID NO: 1274 - RNA, 17 nt, Homo sapiens
gguaauugauacacaac

SEQ ID NO: 1275 - RNA, 17 nt, Homo sapiens
uaauugauacacaacag

SEQ ID NO: 1276 - RNA, 17 nt, Homo sapiens
auugauacacaacaggu

SEQ ID NO: 1277 - RNA, 17 nt, Homo sapiens
gauacacaacaggugac

SEQ ID NO: 1278 - RNA, 17 nt, Homo sapiens
cacaacaggugacuugg

SEQ ID NO: 1279 - RNA, 17 nt, Homo sapiens
aacaggugacuugguuu

SEQ ID NO: 1280 - RNA, 17 nt, Homo sapiens
gugacuugguuuuaggc

SEQ ID NO: 1281 - RNA, 17 nt, Homo sapiens
gguuuuaggcccaaagg

SEQ ID NO: 1282 - RNA, 17 nt, Homo sapiens
gcccaaagguagcagca

SEQ ID NO: 1283 - RNA, 17 nt, Homo sapiens
caaagguagcagcagca

SEQ ID NO: 1284 - RNA, 17 nt, Homo sapiens
agguagcagcagcaaca

SEQ ID NO: 1285 - RNA, 17 nt, Homo sapiens
uagcagcagcaacauua

SEQ ID NO: 1286 - RNA, 17 nt, Homo sapiens
cagcagcaacauuaaua

SEQ ID NO: 1287 - RNA, 17 nt, Homo sapiens
gcagcaacauuaauaau

SEQ ID NO: 1288 - RNA, 17 nt, Homo sapiens
caacauuaauaauggaa

SEQ ID NO: 1289 - RNA, 17 nt, Homo sapiens
cauuaauaauggaaaua

SEQ ID NO: 1290 - RNA, 17 nt, Homo sapiens
uaauggaaauaauugaa

SEQ ID NO: 1291 - RNA, 17 nt, Homo sapiens
uggaaauaauugaauag

SEQ ID NO: 1292 - RNA, 17 nt, Homo sapiens
auaauugaauaguuagu

SEQ ID NO: 1293 - RNA, 17 nt, Homo sapiens
auugaauaguuaguuau

SEQ ID NO: 1294 - RNA, 17 nt, Homo sapiens
aauaguuaguuauguau

SEQ ID NO: 1295 - RNA, 17 nt, Homo sapiens
aguuaguuauguauguu

SEQ ID NO: 1296 - RNA, 17 nt, Homo sapiens
uuaguuauguauguuaa

SEQ ID NO: 1297 - RNA, 17 nt, Homo sapiens
aguuauguauguuaaug

SEQ ID NO: 1298 - RNA, 17 nt, Homo sapiens
uuauguauguuaaugcc

SEQ ID NO: 1299 - RNA, 17 nt, Homo sapiens
guauguuaaugccaguc

SEQ ID NO: 1300 - RNA, 17 nt, Homo sapiens
auguuaaugccagucac

SEQ ID NO: 1301 - RNA, 17 nt, Homo sapiens
uaaugccagucaccagc

SEQ ID NO: 1302 - RNA, 17 nt, Homo sapiens
ugccagucaccagcagg

SEQ ID NO: 1303 - RNA, 17 nt, Homo sapiens
agucaccagcaggcuau

SEQ ID NO: 1304 - RNA, 17 nt, Homo sapiens
accagcaggcuauuuca

SEQ ID NO: 1305 - RNA, 17 nt, Homo sapiens
agcaggcuauuucaagg

SEQ ID NO: 1306 - RNA, 17 nt, Homo sapiens
auuucaaggucagaagu

SEQ ID NO: 1307 - RNA, 17 nt, Homo sapiens
ggucagaaguaaugacu

SEQ ID NO: 1308 - RNA, 17 nt, Homo sapiens
cagaaguaaugacucca

SEQ ID NO: 1309 - RNA, 17 nt, Homo sapiens
aaguaaugacuccauac

SEQ ID NO: 1310 - RNA, 17 nt, Homo sapiens
augacuccauacauauu

SEQ ID NO: 1311 - RNA, 17 nt, Homo sapiens
gacuccauacauauuau

SEQ ID NO: 1312 - RNA, 17 nt, Homo sapiens
cuccauacauauuauuu

SEQ ID NO: 1313 - RNA, 17 nt, Homo sapiens
ccauacauauuauuuau

SEQ ID NO: 1314 - RNA, 17 nt, Homo sapiens
uacauauuauuuauuuc

SEQ ID NO: 1315 - RNA, 17 nt, Homo sapiens
uauuauuuauuucuaua

SEQ ID NO: 1316 - RNA, 17 nt, Homo sapiens
uuauuucuauaacuaca

SEQ ID NO: 1317 - RNA, 17 nt, Homo sapiens
uuucuauaacuacauuu

SEQ ID NO: 1318 - RNA, 17 nt, Homo sapiens
cuauaacuacauuuaaa

SEQ ID NO: 1319 - RNA, 17 nt, Homo sapiens
auaacuacauuuaaauc

SEQ ID NO: 1320 - RNA, 17 nt, Homo sapiens
acauuuaaaucauuacc

SEQ ID NO: 1321 - RNA, 17 nt, Homo sapiens
uuuaaaucauuaccagg

SEQ ID NO: 1322 - RNA, 17 nt, Homo sapiens
ggaucccagccuuuccc

SEQ ID NO: 1323 - RNA, 17 nt, Homo sapiens
uuuccccagcccguagc

SEQ ID NO: 1324 - RNA, 17 nt, Homo sapiens
cccagcccguagccccg

SEQ ID NO: 1325 - RNA, 17 nt, Homo sapiens
agcccguagccccggga

SEQ ID NO: 1326 - RNA, 17 nt, Homo sapiens
gccccgggaccuccgcg

SEQ ID NO: 1327 - RNA, 17 nt, Homo sapiens
ggaccuccgcggugggc

SEQ ID NO: 1328 - RNA, 17 nt, Homo sapiens
ccuccgcggugggcggc

SEQ ID NO: 1329 - RNA, 17 nt, Homo sapiens
cgcggugggcggcgccg

SEQ ID NO: 1330 - RNA, 17 nt, Homo sapiens
ggugggcggcgccgcgc

SEQ ID NO: 1331 - RNA, 17 nt, Homo sapiens
ugggcggcgccgcgcug

SEQ ID NO: 1332 - RNA, 17 nt, Homo sapiens
gcggcgccgcgcugccg

SEQ ID NO: 1333 - RNA, 17 nt, Homo sapiens
ggcgccgcgcugccggc

SEQ ID NO: 1334 - RNA, 17 nt, Homo sapiens
gccgcgcugccggcgca

SEQ ID NO: 1335 - RNA, 17 nt, Homo sapiens
cgcugccggcgcaggga

SEQ ID NO: 1336 - RNA, 17 nt, Homo sapiens
cugccggcgcagggagg

SEQ ID NO: 1337 - RNA, 17 nt, Homo sapiens
cagggagggccucuggu

SEQ ID NO: 1338 - RNA, 17 nt, Homo sapiens
ggccucuggugcaccgg

SEQ ID NO: 1339 - RNA, 17 nt, Homo sapiens
ccucuggugcaccggca

SEQ ID NO: 1340 - RNA, 17 nt, Homo sapiens
ucuggugcaccggcacc

SEQ ID NO: 1341 - RNA, 17 nt, Homo sapiens
gugcaccggcaccgcug

SEQ ID NO: 1342 - RNA, 17 nt, Homo sapiens
gcaccggcaccgcugag

SEQ ID NO: 1343 - RNA, 17 nt, Homo sapiens
ccggcaccgcugagucg

SEQ ID NO: 1344 - RNA, 17 nt, Homo sapiens
accgcugagucggguuc

SEQ ID NO: 1345 - RNA, 17 nt, Homo sapiens
ugagucggguucucucg

SEQ ID NO: 1346 - RNA, 17 nt, Homo sapiens
guucucucgccggccug

SEQ ID NO: 1347 - RNA, 17 nt, Homo sapiens
ucucgccggccuguucc

SEQ ID NO: 1348 - RNA, 17 nt, Homo sapiens
gccggccuguucccggg

SEQ ID NO: 1349 - RNA, 17 nt, Homo sapiens
ccgggagagcccggggc

SEQ ID NO: 1350 - RNA, 17 nt, Homo sapiens
agcccggggcccugcuc

SEQ ID NO: 1351 - RNA, 17 nt, Homo sapiens
ggggcccugcucggaga

SEQ ID NO: 1352 - RNA, 17 nt, Homo sapiens
gcucggagaugccgccc

SEQ ID NO: 1353 - RNA, 17 nt, Homo sapiens
ucggagaugccgccccg

SEQ ID NO: 1354 - RNA, 17 nt, Homo sapiens
gagaugccgccccgggc

SEQ ID NO: 1355 - RNA, 17 nt, Homo sapiens
cgccccgggcccccaga

SEQ ID NO: 1356 - RNA, 17 nt, Homo sapiens
gcccccagacaccggcu

SEQ ID NO: 1357 - RNA, 17 nt, Homo sapiens
ccccagacaccggcucc

SEQ ID NO: 1358 - RNA, 17 nt, Homo sapiens
agacaccggcucccugg

SEQ ID NO: 1359 - RNA, 17 nt, Homo sapiens
gcucccuggccuuccuc

SEQ ID NO: 1360 - RNA, 17 nt, Homo sapiens
uuccucgagcaaccccg

SEQ ID NO: 1361 - RNA, 17 nt, Homo sapiens
cucgagcaaccccgagc

SEQ ID NO: 1362 - RNA, 17 nt, Homo sapiens
aaccccgagcucggcuc

SEQ ID NO: 1363 - RNA, 17 nt, Homo sapiens
cgagcucggcuccgguc

SEQ ID NO: 1364 - RNA, 17 nt, Homo sapiens
cggcuccggucuccagc

SEQ ID NO: 1365 - RNA, 17 nt, Homo sapiens
ggucuccagccaagccc

SEQ ID NO: 1366 - RNA, 17 nt, Homo sapiens
ccagccaagcccaaccc

SEQ ID NO: 1367 - RNA, 17 nt, Homo sapiens
caagcccaaccccgaga

SEQ ID NO: 1368 - RNA, 17 nt, Homo sapiens
cccgagaggccgcggcc

SEQ ID NO: 1369 - RNA, 17 nt, Homo sapiens
gagaggccgcggcccua

SEQ ID NO: 1370 - RNA, 17 nt, Homo sapiens
aggccgcggcccuacug

SEQ ID NO: 1371 - RNA, 17 nt, Homo sapiens
gcggcccuacuggcucc

SEQ ID NO: 1372 - RNA, 17 nt, Homo sapiens
cccuacuggcuccgccu

SEQ ID NO: 1373 - RNA, 17 nt, Homo sapiens
cuggcuccgccucccgc

SEQ ID NO: 1374 - RNA, 17 nt, Homo sapiens
cgccucccgcguugcuc

SEQ ID NO: 1375 - RNA, 17 nt, Homo sapiens
ccucccgcguugcuccc

SEQ ID NO: 1376 - RNA, 17 nt, Homo sapiens
cccgcguugcucccgga

SEQ ID NO: 1377 - RNA, 17 nt, Homo sapiens
ucccggaagccccgccc

SEQ ID NO: 1378 - RNA, 17 nt, Homo sapiens
gaagccccgcccgaccg

SEQ ID NO: 1379 - RNA, 17 nt, Homo sapiens
cccgcccgaccgcggcu

SEQ ID NO: 1380 - RNA, 17 nt, Homo sapiens
gcccgaccgcggcuccu

SEQ ID NO: 1381 - RNA, 17 nt, Homo sapiens
cgaccgcggcuccugac

SEQ ID NO: 1382 - RNA, 17 nt, Homo sapiens
ggcuccugacagacggg

SEQ ID NO: 1383 - RNA, 17 nt, Homo sapiens
ccugacagacgggccgc

SEQ ID NO: 1384 - RNA, 17 nt, Homo sapiens
acagacgggccgcucag

SEQ ID NO: 1385 - RNA, 17 nt, Homo sapiens
gacgggccgcucagcca

SEQ ID NO: 1386 - RNA, 17 nt, Homo sapiens
gccgcucagccaaccgg

SEQ ID NO: 1387 - RNA, 17 nt, Homo sapiens
cucagccaaccggggug

SEQ ID NO: 1388 - RNA, 17 nt, Homo sapiens
caaccgggguggggcgg

SEQ ID NO: 1389 - RNA, 17 nt, Homo sapiens
gggguggggcggggccc

SEQ ID NO: 1390 - RNA, 17 nt, Homo sapiens
ggggcggggcccgaugg

SEQ ID NO: 1391 - RNA, 17 nt, Homo sapiens
ggggcccgauggcgcgc

SEQ ID NO: 1392 - RNA, 17 nt, Homo sapiens
gcccgauggcgcgcagc

SEQ ID NO: 1393 - RNA, 17 nt, Homo sapiens
ccgauggcgcgcagcca

SEQ ID NO: 1394 - RNA, 17 nt, Homo sapiens
gauggcgcgcagccaau

SEQ ID NO: 1395 - RNA, 17 nt, Homo sapiens
ggcgcgcagccaauggu

SEQ ID NO: 1396 - RNA, 17 nt, Homo sapiens
cgcagccaaugguaggc

SEQ ID NO: 1397 - RNA, 17 nt, Homo sapiens
agccaaugguaggccgc

SEQ ID NO: 1398 - RNA, 17 nt, Homo sapiens
aaugguaggccgcgccu

SEQ ID NO: 1399 - RNA, 17 nt, Homo sapiens
gguaggccgcgccuggc

SEQ ID NO: 1400 - RNA, 17 nt, Homo sapiens
uaggccgcgccuggcag

SEQ ID NO: 1401 - RNA, 17 nt, Homo sapiens
cgcgccuggcagacgga

SEQ ID NO: 1402 - RNA, 17 nt, Homo sapiens
ccuggcagacggacggg

SEQ ID NO: 1403 - RNA, 17 nt, Homo sapiens
gcagacggacgggcgcg

SEQ ID NO: 1404 - RNA, 17 nt, Homo sapiens
acggacgggcgcggggc

SEQ ID NO: 1405 - RNA, 17 nt, Homo sapiens
ggacgggcgcggggcgg

SEQ ID NO: 1406 - RNA, 17 nt, Homo sapiens
ggcgcggggcggggcgu

SEQ ID NO: 1407 - RNA, 17 nt, Homo sapiens
ggggcggggcgugcgca

SEQ ID NO: 1408 - RNA, 17 nt, Homo sapiens
ggcggggcgugcgcagg

SEQ ID NO: 1409 - RNA, 17 nt, Homo sapiens
cggggcgugcgcaggcc

SEQ ID NO: 1410 - RNA, 17 nt, Homo sapiens
gggcgugcgcaggcccg

SEQ ID NO: 1411 - RNA, 17 nt, Homo sapiens
gugcgcaggcccgcccg

SEQ ID NO: 1412 - RNA, 17 nt, Homo sapiens
gcaggcccgcccgaguc

SEQ ID NO: 1413 - RNA, 17 nt, Homo sapiens
ccgcccgagucuccgcc

SEQ ID NO: 1414 - RNA, 17 nt, Homo sapiens
gagucuccgccgcccgu

SEQ ID NO: 1415 - RNA, 17 nt, Homo sapiens
ucuccgccgcccgugcc

SEQ ID NO: 1416 - RNA, 17 nt, Homo sapiens
cgccgcccgugcccugc

SEQ ID NO: 1417 - RNA, 17 nt, Homo sapiens
ccgcccgugcccugcgc

SEQ ID NO: 1418 - RNA, 17 nt, Homo sapiens
cgugcccugcgcccgca

SEQ ID NO: 1419 - RNA, 17 nt, Homo sapiens
ugcccugcgcccgcaac

SEQ ID NO: 1420 - RNA, 17 nt, Homo sapiens
cugcgcccgcaacccga

SEQ ID NO: 1421 - RNA, 17 nt, Homo sapiens
cgcccgcaacccgagcc

SEQ ID NO: 1422 - RNA, 17 nt, Homo sapiens
caacccgagccgcaccc

SEQ ID NO: 1423 - RNA, 17 nt, Homo sapiens
cccgagccgcacccgcc

SEQ ID NO: 1424 - RNA, 17 nt, Homo sapiens
cgagccgcacccgccgc

SEQ ID NO: 1425 - RNA, 17 nt, Homo sapiens
ccgcacccgccgcggac

SEQ ID NO: 1426 - RNA, 17 nt, Homo sapiens
cacccgccgcggacgga

SEQ ID NO: 1427 - RNA, 17 nt, Homo sapiens
cgccgcggacggagccc

SEQ ID NO: 1428 - RNA, 17 nt, Homo sapiens
cggacggagcccaugcg

SEQ ID NO: 1429 - RNA, 17 nt, Homo sapiens
cggagcccaugcgcggg

SEQ ID NO: 1430 - RNA, 17 nt, Homo sapiens
gagcccaugcgcggggc

SEQ ID NO: 1431 - RNA, 17 nt, Homo sapiens
gcccaugcgcggggcga

SEQ ID NO: 1432 - RNA, 17 nt, Homo sapiens
ugcgcggggcgaaccgc

SEQ ID NO: 1433 - RNA, 17 nt, Homo sapiens
cggggcgaaccgcgcgc

SEQ ID NO: 1434 - RNA, 17 nt, Homo sapiens
ggcgaaccgcgcgcccc

SEQ ID NO: 1435 - RNA, 17 nt, Homo sapiens
cgaaccgcgcgcccccg

SEQ ID NO: 1436 - RNA, 17 nt, Homo sapiens
aaccgcgcgcccccgcc

SEQ ID NO: 1437 - RNA, 17 nt, Homo sapiens
gcgcccccgcccccgcc

SEQ ID NO: 1438 - RNA, 17 nt, Homo sapiens
ccgcccccgccccgccc

SEQ ID NO: 1439 - RNA, 17 nt, Homo sapiens
cccgccccgccccggcc

SEQ ID NO: 1440 - RNA, 17 nt, Homo sapiens
ccgccccggccucggcc

SEQ ID NO: 1441 - RNA, 17 nt, Homo sapiens
cggccucggccccggcc

SEQ ID NO: 1442 - RNA, 17 nt, Homo sapiens
cggccccggcccuggcc

SEQ ID NO: 1443 - RNA, 17 nt, Homo sapiens
cggcccuggccccgggg

SEQ ID NO: 1444 - RNA, 17 nt, Homo sapiens
ccccgggggcagucgcg

SEQ ID NO: 1445 - RNA, 17 nt, Homo sapiens
cgggggcagucgcgccu

SEQ ID NO: 1446 - RNA, 17 nt, Homo sapiens
gggcagucgcgccugug

SEQ ID NO: 1447 - RNA, 17 nt, Homo sapiens
gcagucgcgccugugaa

SEQ ID NO: 1448 - RNA, 17 nt, Homo sapiens
ucgcgccugugaacggu

SEQ ID NO: 1449 - RNA, 17 nt, Homo sapiens
gccugugaacggugagu

SEQ ID NO: 1450 - RNA, 17 nt, Homo sapiens
ugugaacggugagugcg

SEQ ID NO: 1451 - RNA, 17 nt, Homo sapiens
aacggugagugcgggca

SEQ ID NO: 1452 - RNA, 17 nt, Homo sapiens
cggugagugcgggcagg

SEQ ID NO: 1453 - RNA, 17 nt, Homo sapiens
gagugcgggcagggauc

SEQ ID NO: 1454 - RNA, 17 nt, Homo sapiens
gggcagggaucggccgg

SEQ ID NO: 1455 - RNA, 17 nt, Homo sapiens
agggaucggccgggccg

SEQ ID NO: 1456 - RNA, 17 nt, Homo sapiens
ucggccgggccgcgcgc

SEQ ID NO: 1457 - RNA, 17 nt, Homo sapiens
gccgggccgcgcgcccu

SEQ ID NO: 1458 - RNA, 17 nt, Homo sapiens
cgggccgcgcgcccucc

SEQ ID NO: 1459 - RNA, 17 nt, Homo sapiens
ggccgcgcgcccuccuc

SEQ ID NO: 1460 - RNA, 17 nt, Homo sapiens
cccuccucgcccccagg

SEQ ID NO: 1461 - RNA, 17 nt, Homo sapiens
gcccccaggcggcagca

SEQ ID NO: 1462 - RNA, 17 nt, Homo sapiens
cccaggcggcagcaaua

SEQ ID NO: 1463 - RNA, 17 nt, Homo sapiens
aggcggcagcaauacgc

SEQ ID NO: 1464 - RNA, 17 nt, Homo sapiens
cggcagcaauacgcgcg

SEQ ID NO: 1465 - RNA, 17 nt, Homo sapiens
gcagcaauacgcgcggc

SEQ ID NO: 1466 - RNA, 17 nt, Homo sapiens
agcaauacgcgcggcgc

SEQ ID NO: 1467 - RNA, 17 nt, Homo sapiens
caauacgcgcggcgcgg

SEQ ID NO: 1468 - RNA, 17 nt, Homo sapiens
uacgcgcggcgcgggcc

SEQ ID NO: 1469 - RNA, 17 nt, Homo sapiens
cgcgcggcgcgggccgg

SEQ ID NO: 1470 - RNA, 17 nt, Homo sapiens
cggcgcgggccgggggc

SEQ ID NO: 1471 - RNA, 17 nt, Homo sapiens
ggccgggggcgcggggc

SEQ ID NO: 1472 - RNA, 17 nt, Homo sapiens
ccgggggcgcggggccg

SEQ ID NO: 1473 - RNA, 17 nt, Homo sapiens
ggcgcggggccggcggg

SEQ ID NO: 1474 - RNA, 17 nt, Homo sapiens
cggggccggcgggcgua

SEQ ID NO: 1475 - RNA, 17 nt, Homo sapiens
gccggcgggcguaagcg

SEQ ID NO: 1476 - RNA, 17 nt, Homo sapiens
cggcgggcguaagcggc

SEQ ID NO: 1477 - RNA, 17 nt, Homo sapiens
gggcguaagcggcggcg

SEQ ID NO: 1478 - RNA, 17 nt, Homo sapiens
cguaagcggcggcggcg

SEQ ID NO: 1479 - RNA, 17 nt, Homo sapiens
aagcggcggcggcggcg

SEQ ID NO: 1480 - RNA, 17 nt, Homo sapiens
cggcggcggcggcggcg

SEQ ID NO: 1481 - RNA, 17 nt, Homo sapiens
cggcggcggcggcgggu

SEQ ID NO: 1482 - RNA, 17 nt, Homo sapiens
cggcggcggcggguggg

SEQ ID NO: 1483 - RNA, 17 nt, Homo sapiens
ggcggcggguggguggg

SEQ ID NO: 1484 - RNA, 17 nt, Homo sapiens
gcggguggguggggccg

SEQ ID NO: 1485 - RNA, 17 nt, Homo sapiens
uggguggggccgggcgg

SEQ ID NO: 1486 - RNA, 17 nt, Homo sapiens
ggggccgggcggggccc

SEQ ID NO: 1487 - RNA, 17 nt, Homo sapiens
cgggcggggcccgcggg

SEQ ID NO: 1488 - RNA, 17 nt, Homo sapiens
cggggcccgcgggcaca

SEQ ID NO: 1489 - RNA, 17 nt, Homo sapiens
gcccgcgggcacaggug

SEQ ID NO: 1490 - RNA, 17 nt, Homo sapiens
ccgcgggcacaggugag

SEQ ID NO: 1491 - RNA, 17 nt, Homo sapiens
gggcacaggugagcggg

SEQ ID NO: 1492 - RNA, 17 nt, Homo sapiens
acaggugagcgggcguc

SEQ ID NO: 1493 - RNA, 17 nt, Homo sapiens
gugagcgggcgucgggg

SEQ ID NO: 1494 - RNA, 17 nt, Homo sapiens
gagcgggcgucgggggc

SEQ ID NO: 1495 - RNA, 17 nt, Homo sapiens
cgucgggggcugcggcg

SEQ ID NO: 1496 - RNA, 17 nt, Homo sapiens
cgggggcugcggcgggc

SEQ ID NO: 1497 - RNA, 17 nt, Homo sapiens
gggcugcggcgggcggg

SEQ ID NO: 1498 - RNA, 17 nt, Homo sapiens
ugcggcgggcgggggcc

SEQ ID NO: 1499 - RNA, 17 nt, Homo sapiens
gggcgggggccccuucc

SEQ ID NO: 1500 - RNA, 17 nt, Homo sapiens
ucccuggggccugcggg

SEQ ID NO: 1501 - RNA, 17 nt, Homo sapiens
uggggccugcgggaauc

SEQ ID NO: 1502 - RNA, 17 nt, Homo sapiens
cugcgggaauccgggcc

SEQ ID NO: 1503 - RNA, 17 nt, Homo sapiens
gaauccgggccccaccc

SEQ ID NO: 1504 - RNA, 17 nt, Homo sapiens
cgggccccacccguggc

SEQ ID NO: 1505 - RNA, 17 nt, Homo sapiens
ccccacccguggccucg

SEQ ID NO: 1506 - RNA, 17 nt, Homo sapiens
cacccguggccucgcgc

SEQ ID NO: 1507 - RNA, 17 nt, Homo sapiens
guggccucgcgcugggc

SEQ ID NO: 1508 - RNA, 17 nt, Homo sapiens
ggccucgcgcugggcac

SEQ ID NO: 1509 - RNA, 17 nt, Homo sapiens
cgcgcugggcacggucc

SEQ ID NO: 1510 - RNA, 17 nt, Homo sapiens
cgcugggcacggucccc

SEQ ID NO: 1511 - RNA, 17 nt, Homo sapiens
ugggcacgguccccacg

SEQ ID NO: 1512 - RNA, 17 nt, Homo sapiens
cgguccccacgccggcg

SEQ ID NO: 1513 - RNA, 17 nt, Homo sapiens
guccccacgccggcgua

SEQ ID NO: 1514 - RNA, 17 nt, Homo sapiens
ccacgccggcguacccg

SEQ ID NO: 1515 - RNA, 17 nt, Homo sapiens
acgccggcguacccggg

SEQ ID NO: 1516 - RNA, 17 nt, Homo sapiens
gccggcguacccgggag

SEQ ID NO: 1517 - RNA, 17 nt, Homo sapiens
acccgggagccucgggc

SEQ ID NO: 1518 - RNA, 17 nt, Homo sapiens
agccucgggcccggcgc

SEQ ID NO: 1519 - RNA, 17 nt, Homo sapiens
cgggcccggcgcccuca

SEQ ID NO: 1520 - RNA, 17 nt, Homo sapiens
ggcccggcgcccucaca

SEQ ID NO: 1521 - RNA, 17 nt, Homo sapiens
gcgcccucacacccggg

SEQ ID NO: 1522 - RNA, 17 nt, Homo sapiens
gcccucacacccggggg

SEQ ID NO: 1523 - RNA, 17 nt, Homo sapiens
acccgggggcgucuggg

SEQ ID NO: 1524 - RNA, 17 nt, Homo sapiens
ccgggggcgucugggag

SEQ ID NO: 1525 - RNA, 17 nt, Homo sapiens
gggaggaggcggccgcg

SEQ ID NO: 1526 - RNA, 17 nt, Homo sapiens
aggaggcggccgcggcc

SEQ ID NO: 1527 - RNA, 17 nt, Homo sapiens
aggcggccgcggccacg

SEQ ID NO: 1528 - RNA, 17 nt, Homo sapiens
cggccgcggccacggca

SEQ ID NO: 1529 - RNA, 17 nt, Homo sapiens
ccgcggccacggcacgc

SEQ ID NO: 1530 - RNA, 17 nt, Homo sapiens
cggccacggcacgcccg

SEQ ID NO: 1531 - RNA, 17 nt, Homo sapiens
gccacggcacgcccggg

SEQ ID NO: 1532 - RNA, 17 nt, Homo sapiens
cacggcacgcccgggca

SEQ ID NO: 1533 - RNA, 17 nt, Homo sapiens
acgcccgggcacccccg

SEQ ID NO: 1534 - RNA, 17 nt, Homo sapiens
gcccgggcacccccgau

SEQ ID NO: 1535 - RNA, 17 nt, Homo sapiens
cacccccgauucagcau

SEQ ID NO: 1536 - RNA, 17 nt, Homo sapiens
ccgauucagcaucacag

SEQ ID NO: 1537 - RNA, 17 nt, Homo sapiens
gauucagcaucacaggu

SEQ ID NO: 1538 - RNA, 17 nt, Homo sapiens
ucagcaucacaggucgc

SEQ ID NO: 1539 - RNA, 17 nt, Homo sapiens
caucacaggucgcggac

SEQ ID NO: 1540 - RNA, 17 nt, Homo sapiens
cacaggucgcggaccag

SEQ ID NO: 1541 - RNA, 17 nt, Homo sapiens
ggucgcggaccaggccg

SEQ ID NO: 1542 - RNA, 17 nt, Homo sapiens
cggaccaggccgggggc

SEQ ID NO: 1543 - RNA, 17 nt, Homo sapiens
ggccgggggccucagcc

SEQ ID NO: 1544 - RNA, 17 nt, Homo sapiens
gggccucagccccagug

SEQ ID NO: 1545 - RNA, 17 nt, Homo sapiens
cagccccagugccuuuu

SEQ ID NO: 1546 - RNA, 17 nt, Homo sapiens
gccccagugccuuuucc

SEQ ID NO: 1547 - RNA, 17 nt, Homo sapiens
cucuccgggucucccgc

SEQ ID NO: 1548 - RNA, 17 nt, Homo sapiens
ggucucccgcgccgcuu

SEQ ID NO: 1549 - RNA, 17 nt, Homo sapiens
ucucccgcgccgcuucu

SEQ ID NO: 1550 - RNA, 17 nt, Homo sapiens
cccgcgccgcuucucgg

SEQ ID NO: 1551 - RNA, 17 nt, Homo sapiens
gcuucucggccccuucc

SEQ ID NO: 1552 - RNA, 17 nt, Homo sapiens
cccuuccugucgcucag

SEQ ID NO: 1553 - RNA, 17 nt, Homo sapiens
uuccugucgcucagucc

SEQ ID NO: 1554 - RNA, 17 nt, Homo sapiens
gucgcucagucccugcu

SEQ ID NO: 1555 - RNA, 17 nt, Homo sapiens
cagucccugcuucccag

SEQ ID NO: 1556 - RNA, 17 nt, Homo sapiens
ucccaggagcuccucug

SEQ ID NO: 1557 - RNA, 17 nt, Homo sapiens
gcuccucugucuucucc

SEQ ID NO: 1558 - RNA, 17 nt, Homo sapiens
cuucuccagcuuucugu

SEQ ID NO: 1559 - RNA, 17 nt, Homo sapiens
agcuuucuguggcugaa

SEQ ID NO: 1560 - RNA, 17 nt, Homo sapiens
uuucuguggcugaaaga

SEQ ID NO: 1561 - RNA, 17 nt, Homo sapiens
gcugaaagaugcccccg

SEQ ID NO: 1562 - RNA, 17 nt, Homo sapiens
ugaaagaugcccccggu

SEQ ID NO: 1563 - RNA, 17 nt, Homo sapiens
ugcccccgguuccccgc

SEQ ID NO: 1564 - RNA, 17 nt, Homo sapiens
gguuccccgccgggggu

SEQ ID NO: 1565 - RNA, 17 nt, Homo sapiens
cgccgggggugcggggc

SEQ ID NO: 1566 - RNA, 17 nt, Homo sapiens
ccgggggugcggggcgc

SEQ ID NO: 1567 - RNA, 17 nt, Homo sapiens
ggugcggggcgcugccc

SEQ ID NO: 1568 - RNA, 17 nt, Homo sapiens
ugcggggcgcugcccgg

SEQ ID NO: 1569 - RNA, 17 nt, Homo sapiens
ggggcgcugcccggguc

SEQ ID NO: 1570 - RNA, 17 nt, Homo sapiens
cugcccgggucugcccu

SEQ ID NO: 1571 - RNA, 17 nt, Homo sapiens
ccgggucugcccucccc

SEQ ID NO: 1572 - RNA, 17 nt, Homo sapiens
uccccucggcggcgccu

SEQ ID NO: 1573 - RNA, 17 nt, Homo sapiens
ccucggcggcgccuagu

SEQ ID NO: 1574 - RNA, 17 nt, Homo sapiens
ucggcggcgccuaguac

SEQ ID NO: 1575 - RNA, 17 nt, Homo sapiens
ggcgccuaguacgcagu

SEQ ID NO: 1576 - RNA, 17 nt, Homo sapiens
cgccuaguacgcaguag

SEQ ID NO: 1577 - RNA, 17 nt, Homo sapiens
ccuaguacgcaguaggc

SEQ ID NO: 1578 - RNA, 17 nt, Homo sapiens
aguacgcaguaggcgcu

SEQ ID NO: 1579 - RNA, 17 nt, Homo sapiens
cgcaguaggcgcucagc

SEQ ID NO: 1580 - RNA, 17 nt, Homo sapiens
caguaggcgcucagcaa

SEQ ID NO: 1581 - RNA, 17 nt, Homo sapiens
ggcgcucagcaaauacu

SEQ ID NO: 1582 - RNA, 17 nt, Homo sapiens
cucagcaaauacuuguc

SEQ ID NO: 1583 - RNA, 17 nt, Homo sapiens
cagcaaauacuugucgg

SEQ ID NO: 1584 - RNA, 17 nt, Homo sapiens
aaauacuugucggaggc

SEQ ID NO: 1585 - RNA, 17 nt, Homo sapiens
ugucggaggcaccagcg

SEQ ID NO: 1586 - RNA, 17 nt, Homo sapiens
ucggaggcaccagcgcc

SEQ ID NO: 1587 - RNA, 17 nt, Homo sapiens
aggcaccagcgccgcgg

SEQ ID NO: 1588 - RNA, 17 nt, Homo sapiens
gcaccagcgccgcgggg

SEQ ID NO: 1589 - RNA, 17 nt, Homo sapiens
ccagcgccgcggggccu

SEQ ID NO: 1590 - RNA, 17 nt, Homo sapiens
gccgcggggccugcagg

SEQ ID NO: 1591 - RNA, 17 nt, Homo sapiens
cggggccugcaggcugg

SEQ ID NO: 1592 - RNA, 17 nt, Homo sapiens
gccugcaggcuggcacu

SEQ ID NO: 1593 - RNA, 17 nt, Homo sapiens
gcaggcuggcacuagcc

SEQ ID NO: 1594 - RNA, 17 nt, Homo sapiens
aggcuggcacuagccug

SEQ ID NO: 1595 - RNA, 17 nt, Homo sapiens
uggcacuagccugcccg

SEQ ID NO: 1596 - RNA, 17 nt, Homo sapiens
acuagccugcccgggca

SEQ ID NO: 1597 - RNA, 17 nt, Homo sapiens
cugcccgggcacgccgu

SEQ ID NO: 1598 - RNA, 17 nt, Homo sapiens
gcccgggcacgccgugg

SEQ ID NO: 1599 - RNA, 17 nt, Homo sapiens
ccgggcacgccguggcg

SEQ ID NO: 1600 - RNA, 17 nt, Homo sapiens
ggcacgccguggcgcgc

SEQ ID NO: 1601 - RNA, 17 nt, Homo sapiens
acgccguggcgcgcucc

SEQ ID NO: 1602 - RNA, 17 nt, Homo sapiens
gccguggcgcgcuccgc

SEQ ID NO: 1603 - RNA, 17 nt, Homo sapiens
cguggcgcgcuccgccg

SEQ ID NO: 1604 - RNA, 17 nt, Homo sapiens
cgcgcuccgccguggcc

SEQ ID NO: 1605 - RNA, 17 nt, Homo sapiens
gcuccgccguggccaga

SEQ ID NO: 1606 - RNA, 17 nt, Homo sapiens
ccgccguggccagaccu

SEQ ID NO: 1607 - RNA, 17 nt, Homo sapiens
guggccagaccuguucu

SEQ ID NO: 1608 - RNA, 17 nt, Homo sapiens
ccagaccuguucuggag

SEQ ID NO: 1609 - RNA, 17 nt, Homo sapiens
ucuggaggacgguaacc

SEQ ID NO: 1610 - RNA, 17 nt, Homo sapiens
ggaggacgguaaccuca

SEQ ID NO: 1611 - RNA, 17 nt, Homo sapiens
ggacgguaaccucagcc

SEQ ID NO: 1612 - RNA, 17 nt, Homo sapiens
uaaccucagcccucggg

SEQ ID NO: 1613 - RNA, 17 nt, Homo sapiens
gcccucgggcgccuccc

SEQ ID NO: 1614 - RNA, 17 nt, Homo sapiens
ccucgggcgccucccuu

SEQ ID NO: 1615 - RNA, 17 nt, Homo sapiens
ucccuuuagccuuucug

SEQ ID NO: 1616 - RNA, 17 nt, Homo sapiens
gccuuucugccgaccca

SEQ ID NO: 1617 - RNA, 17 nt, Homo sapiens
uucugccgacccagcag

SEQ ID NO: 1618 - RNA, 17 nt, Homo sapiens
ccgacccagcagcuucu

SEQ ID NO: 1619 - RNA, 17 nt, Homo sapiens
acccagcagcuucuaau

SEQ ID NO: 1620 - RNA, 17 nt, Homo sapiens
agcuucuaauuugggug

SEQ ID NO: 1621 - RNA, 17 nt, Homo sapiens
uaauuugggugcguggu

SEQ ID NO: 1622 - RNA, 17 nt, Homo sapiens
auuugggugcgugguug

SEQ ID NO: 1623 - RNA, 17 nt, Homo sapiens
uugggugcgugguugag

SEQ ID NO: 1624 - RNA, 17 nt, Homo sapiens
ggugcgugguugagagc

SEQ ID NO: 1625 - RNA, 17 nt, Homo sapiens
gguugagagcgcucagc

SEQ ID NO: 1626 - RNA, 17 nt, Homo sapiens
uugagagcgcucagcug

SEQ ID NO: 1627 - RNA, 17 nt, Homo sapiens
agcgcucagcugucagc

SEQ ID NO: 1628 - RNA, 17 nt, Homo sapiens
gcucagcugucagcccu

SEQ ID NO: 1629 - RNA, 17 nt, Homo sapiens
agcugucagcccugccu

SEQ ID NO: 1630 - RNA, 17 nt, Homo sapiens
ucagcccugccuuugag

SEQ ID NO: 1631 - RNA, 17 nt, Homo sapiens
cuuugagggcugggucc

SEQ ID NO: 1632 - RNA, 17 nt, Homo sapiens
agggcugggucccuuuu

SEQ ID NO: 1633 - RNA, 17 nt, Homo sapiens
cuuuucccaucacuggg

SEQ ID NO: 1634 - RNA, 17 nt, Homo sapiens
uucccaucacuggguca

SEQ ID NO: 1635 - RNA, 17 nt, Homo sapiens
aucacugggucauuaag

SEQ ID NO: 1636 - RNA, 17 nt, Homo sapiens
acugggucauuaagagc

SEQ ID NO: 1637 - RNA, 17 nt, Homo sapiens
cauuaagagcaaguggg

SEQ ID NO: 1638 - RNA, 17 nt, Homo sapiens
aagagcaagugggggcg

SEQ ID NO: 1639 - RNA, 17 nt, Homo sapiens
aagugggggcgaggcga

SEQ ID NO: 1640 - RNA, 17 nt, Homo sapiens
ggggcgaggcgacagcc

SEQ ID NO: 1641 - RNA, 17 nt, Homo sapiens
gcgaggcgacagcccuc

SEQ ID NO: 1642 - RNA, 17 nt, Homo sapiens
aggcgacagcccucccg

SEQ ID NO: 1643 - RNA, 17 nt, Homo sapiens
gcccucccgcacgcugg

SEQ ID NO: 1644 - RNA, 17 nt, Homo sapiens
ccucccgcacgcugggu

SEQ ID NO: 1645 - RNA, 17 nt, Homo sapiens
ucccgcacgcuggguug

SEQ ID NO: 1646 - RNA, 17 nt, Homo sapiens
cacgcuggguugcagcu

SEQ ID NO: 1647 - RNA, 17 nt, Homo sapiens
gcuggguugcagcugca

SEQ ID NO: 1648 - RNA, 17 nt, Homo sapiens
ggguugcagcugcacag

SEQ ID NO: 1649 - RNA, 17 nt, Homo sapiens
uugcagcugcacaggua

SEQ ID NO: 1650 - RNA, 17 nt, Homo sapiens
gcagcugcacagguagg

SEQ ID NO: 1651 - RNA, 17 nt, Homo sapiens
cugcacagguaggcacg

SEQ ID NO: 1652 - RNA, 17 nt, Homo sapiens
acagguaggcacgcugc

SEQ ID NO: 1653 - RNA, 17 nt, Homo sapiens
agguaggcacgcugcag

SEQ ID NO: 1654 - RNA, 17 nt, Homo sapiens
guaggcacgcugcaguc

SEQ ID NO: 1655 - RNA, 17 nt, Homo sapiens
ggcacgcugcaguccuu

SEQ ID NO: 1656 - RNA, 17 nt, Homo sapiens
acgcugcaguccuugcu

SEQ ID NO: 1657 - RNA, 17 nt, Homo sapiens
caguccuugcugccugg

SEQ ID NO: 1658 - RNA, 17 nt, Homo sapiens
uccuugcugccuggcgu

SEQ ID NO: 1659 - RNA, 17 nt, Homo sapiens
gcugccuggcguugggg

SEQ ID NO: 1660 - RNA, 17 nt, Homo sapiens
ugccuggcguuggggcc

SEQ ID NO: 1661 - RNA, 17 nt, Homo sapiens
gcguuggggcccaggga

SEQ ID NO: 1662 - RNA, 17 nt, Homo sapiens
gcccagggaccgcugug

SEQ ID NO: 1663 - RNA, 17 nt, Homo sapiens
cagggaccgcugugggu

SEQ ID NO: 1664 - RNA, 17 nt, Homo sapiens
ggaccgcuguggguuug

SEQ ID NO: 1665 - RNA, 17 nt, Homo sapiens
cgcuguggguuugcccu

SEQ ID NO: 1666 - RNA, 17 nt, Homo sapiens
guggguuugcccuucag

SEQ ID NO: 1667 - RNA, 17 nt, Homo sapiens
cccuucagauggcccug

SEQ ID NO: 1668 - RNA, 17 nt, Homo sapiens
uucagauggcccugcca

SEQ ID NO: 1669 - RNA, 17 nt, Homo sapiens
auggcccugccagcagc

SEQ ID NO: 1670 - RNA, 17 nt, Homo sapiens
cccugccagcagcugcc

SEQ ID NO: 1671 - RNA, 17 nt, Homo sapiens
ugccagcagcugcccug

SEQ ID NO: 1672 - RNA, 17 nt, Homo sapiens
cagcagcugcccugugg

SEQ ID NO: 1673 - RNA, 17 nt, Homo sapiens
gcugcccuguggggccu

SEQ ID NO: 1674 - RNA, 17 nt, Homo sapiens
ccuguggggccuggggc

SEQ ID NO: 1675 - RNA, 17 nt, Homo sapiens
ggccuggggcugggccu

SEQ ID NO: 1676 - RNA, 17 nt, Homo sapiens
ggggcugggccugggcc

SEQ ID NO: 1677 - RNA, 17 nt, Homo sapiens
gggccugggccuggcug

SEQ ID NO: 1678 - RNA, 17 nt, Homo sapiens
ugggccuggcugagcag

SEQ ID NO: 1679 - RNA, 17 nt, Homo sapiens
cuggcugagcagggccc

SEQ ID NO: 1680 - RNA, 17 nt, Homo sapiens
ugagcagggcccuccuu

SEQ ID NO: 1681 - RNA, 17 nt, Homo sapiens
ccuccuuggcagguggg

SEQ ID NO: 1682 - RNA, 17 nt, Homo sapiens
cuuggcagguggggcag

SEQ ID NO: 1683 - RNA, 17 nt, Homo sapiens
cagguggggcaggagac

SEQ ID NO: 1684 - RNA, 17 nt, Homo sapiens
ggcaggagacccuguag

SEQ ID NO: 1685 - RNA, 17 nt, Homo sapiens
gagacccuguaggagga

SEQ ID NO: 1686 - RNA, 17 nt, Homo sapiens
guaggaggaccccgggc

SEQ ID NO: 1687 - RNA, 17 nt, Homo sapiens
gaccccgggccgcaggc

SEQ ID NO: 1688 - RNA, 17 nt, Homo sapiens
cccgggccgcaggcccc

SEQ ID NO: 1689 - RNA, 17 nt, Homo sapiens
ggccgcaggccccugag

SEQ ID NO: 1690 - RNA, 17 nt, Homo sapiens
ccugaggagcgaugacg

SEQ ID NO: 1691 - RNA, 17 nt, Homo sapiens
gaggagcgaugacggaa

SEQ ID NO: 1692 - RNA, 17 nt, Homo sapiens
gagcgaugacggaauau

SEQ ID NO: 1693 - RNA, 17 nt, Homo sapiens
augacggaauauaagcu

SEQ ID NO: 1694 - RNA, 17 nt, Homo sapiens
gacggaauauaagcugg

SEQ ID NO: 1695 - RNA, 17 nt, Homo sapiens
gaauauaagcugguggu

SEQ ID NO: 1696 - RNA, 17 nt, Homo sapiens
auaagcuggugguggug

SEQ ID NO: 1697 - RNA, 17 nt, Homo sapiens
agcuggugguggugggc

SEQ ID NO: 1698 - RNA, 17 nt, Homo sapiens
uggugguggugggcgcc

SEQ ID NO: 1699 - RNA, 17 nt, Homo sapiens
gguggugggcgccggcg

SEQ ID NO: 1700 - RNA, 17 nt, Homo sapiens
uggugggcgccggcggu

SEQ ID NO: 1701 - RNA, 17 nt, Homo sapiens
gggcgccggcggugugg

SEQ ID NO: 1702 - RNA, 17 nt, Homo sapiens
cgccggcggugugggca

SEQ ID NO: 1703 - RNA, 17 nt, Homo sapiens
ccggcggugugggcaag

SEQ ID NO: 1704 - RNA, 17 nt, Homo sapiens
cggugugggcaagagug

SEQ ID NO: 1705 - RNA, 17 nt, Homo sapiens
gggcaagagugcgcuga

SEQ ID NO: 1706 - RNA, 17 nt, Homo sapiens
gcaagagugcgcugacc

SEQ ID NO: 1707 - RNA, 17 nt, Homo sapiens
aagagugcgcugaccau

SEQ ID NO: 1708 - RNA, 17 nt, Homo sapiens
gugcgcugaccauccag

SEQ ID NO: 1709 - RNA, 17 nt, Homo sapiens
cgcugaccauccagcug

SEQ ID NO: 1710 - RNA, 17 nt, Homo sapiens
accauccagcugaucca

SEQ ID NO: 1711 - RNA, 17 nt, Homo sapiens
uccagcugauccagaac

SEQ ID NO: 1712 - RNA, 17 nt, Homo sapiens
gauccagaaccauuuug

SEQ ID NO: 1713 - RNA, 17 nt, Homo sapiens
ccagaaccauuuugugg

SEQ ID NO: 1714 - RNA, 17 nt, Homo sapiens
accauuuuguggacgaa

SEQ ID NO: 1715 - RNA, 17 nt, Homo sapiens
uuuuguggacgaauacg

SEQ ID NO: 1716 - RNA, 17 nt, Homo sapiens
guggacgaauacgaccc

SEQ ID NO: 1717 - RNA, 17 nt, Homo sapiens
ggacgaauacgacccca

SEQ ID NO: 1718 - RNA, 17 nt, Homo sapiens
cgaauacgaccccacua

SEQ ID NO: 1719 - RNA, 17 nt, Homo sapiens
acgaccccacuauagag

SEQ ID NO: 1720 - RNA, 17 nt, Homo sapiens
accccacuauagaggau

SEQ ID NO: 1721 - RNA, 17 nt, Homo sapiens
uauagaggauuccuacc

SEQ ID NO: 1722 - RNA, 17 nt, Homo sapiens
ggauuccuaccggaagc

SEQ ID NO: 1723 - RNA, 17 nt, Homo sapiens
uaccggaagcagguggu

SEQ ID NO: 1724 - RNA, 17 nt, Homo sapiens
ggaagcagguggucauu

SEQ ID NO: 1725 - RNA, 17 nt, Homo sapiens
agcagguggucauugau

SEQ ID NO: 1726 - RNA, 17 nt, Homo sapiens
agguggucauugauggg

SEQ ID NO: 1727 - RNA, 17 nt, Homo sapiens
ggucauugauggggaga

SEQ ID NO: 1728 - RNA, 17 nt, Homo sapiens
auggggagacgugccug

SEQ ID NO: 1729 - RNA, 17 nt, Homo sapiens
ggggagacgugccuguu

SEQ ID NO: 1730 - RNA, 17 nt, Homo sapiens
ggagacgugccuguugg

SEQ ID NO: 1731 - RNA, 17 nt, Homo sapiens
acgugccuguuggacau

SEQ ID NO: 1732 - RNA, 17 nt, Homo sapiens
ccuguuggacauccugg

SEQ ID NO: 1733 - RNA, 17 nt, Homo sapiens
uguuggacauccuggau

SEQ ID NO: 1734 - RNA, 17 nt, Homo sapiens
cauccuggauaccgccg

SEQ ID NO: 1735 - RNA, 17 nt, Homo sapiens
uccuggauaccgccggc

SEQ ID NO: 1736 - RNA, 17 nt, Homo sapiens
uggauaccgccggccag

SEQ ID NO: 1737 - RNA, 17 nt, Homo sapiens
uaccgccggccaggagg

SEQ ID NO: 1738 - RNA, 17 nt, Homo sapiens
caggaggaguacagcgc

SEQ ID NO: 1739 - RNA, 17 nt, Homo sapiens
ggaggaguacagcgcca

SEQ ID NO: 1740 - RNA, 17 nt, Homo sapiens
ggaguacagcgccaugc

SEQ ID NO: 1741 - RNA, 17 nt, Homo sapiens
aguacagcgccaugcgg

SEQ ID NO: 1742 - RNA, 17 nt, Homo sapiens
acagcgccaugcgggac

SEQ ID NO: 1743 - RNA, 17 nt, Homo sapiens
agcgccaugcgggacca

SEQ ID NO: 1744 - RNA, 17 nt, Homo sapiens
caugcgggaccaguaca

SEQ ID NO: 1745 - RNA, 17 nt, Homo sapiens
cgggaccaguacaugcg

SEQ ID NO: 1746 - RNA, 17 nt, Homo sapiens
ggaccaguacaugcgca

SEQ ID NO: 1747 - RNA, 17 nt, Homo sapiens
accaguacaugcgcacc

SEQ ID NO: 1748 - RNA, 17 nt, Homo sapiens
caguacaugcgcaccgg

SEQ ID NO: 1749 - RNA, 17 nt, Homo sapiens
guacaugcgcaccgggg

SEQ ID NO: 1750 - RNA, 17 nt, Homo sapiens
acaugcgcaccggggag

SEQ ID NO: 1751 - RNA, 17 nt, Homo sapiens
cggggagggcuuccugu

SEQ ID NO: 1752 - RNA, 17 nt, Homo sapiens
ggcuuccuguguguguu

SEQ ID NO: 1753 - RNA, 17 nt, Homo sapiens
cuuccuguguguguuug

SEQ ID NO: 1754 - RNA, 17 nt, Homo sapiens
uccuguguguguuugcc

SEQ ID NO: 1755 - RNA, 17 nt, Homo sapiens
cuguguguguuugccau

SEQ ID NO: 1756 - RNA, 17 nt, Homo sapiens
guguguuugccaucaac

SEQ ID NO: 1757 - RNA, 17 nt, Homo sapiens
uguuugccaucaacaac

SEQ ID NO: 1758 - RNA, 17 nt, Homo sapiens
ugccaucaacaacacca

SEQ ID NO: 1759 - RNA, 17 nt, Homo sapiens
caucaacaacaccaagu

SEQ ID NO: 1760 - RNA, 17 nt, Homo sapiens
ucaacaacaccaagucu

SEQ ID NO: 1761 - RNA, 17 nt, Homo sapiens
aacaccaagucuuuuga

SEQ ID NO: 1762 - RNA, 17 nt, Homo sapiens
uuuugaggacauccacc

SEQ ID NO: 1763 - RNA, 17 nt, Homo sapiens
uugaggacauccaccag

SEQ ID NO: 1764 - RNA, 17 nt, Homo sapiens
ggacauccaccaguaca

SEQ ID NO: 1765 - RNA, 17 nt, Homo sapiens
auccaccaguacaggga

SEQ ID NO: 1766 - RNA, 17 nt, Homo sapiens
ccaccaguacagggagc

SEQ ID NO: 1767 - RNA, 17 nt, Homo sapiens
uacagggagcagaucaa

SEQ ID NO: 1768 - RNA, 17 nt, Homo sapiens
gggagcagaucaaacgg

SEQ ID NO: 1769 - RNA, 17 nt, Homo sapiens
cagaucaaacgggugaa

SEQ ID NO: 1770 - RNA, 17 nt, Homo sapiens
ucaaacgggugaaggac

SEQ ID NO: 1771 - RNA, 17 nt, Homo sapiens
ggugaaggacucggaug

SEQ ID NO: 1772 - RNA, 17 nt, Homo sapiens
ggacucggaugacgugc

SEQ ID NO: 1773 - RNA, 17 nt, Homo sapiens
cucggaugacgugccca

SEQ ID NO: 1774 - RNA, 17 nt, Homo sapiens
cggaugacgugcccaug

SEQ ID NO: 1775 - RNA, 17 nt, Homo sapiens
gaugacgugcccauggu

SEQ ID NO: 1776 - RNA, 17 nt, Homo sapiens
acgugcccauggugcug

SEQ ID NO: 1777 - RNA, 17 nt, Homo sapiens
ugcccauggugcuggug

SEQ ID NO: 1778 - RNA, 17 nt, Homo sapiens
cccauggugcugguggg

SEQ ID NO: 1779 - RNA, 17 nt, Homo sapiens
uggugcugguggggaac

SEQ ID NO: 1780 - RNA, 17 nt, Homo sapiens
gguggggaacaagugug

SEQ ID NO: 1781 - RNA, 17 nt, Homo sapiens
gggaacaagugugaccu

SEQ ID NO: 1782 - RNA, 17 nt, Homo sapiens
gaacaagugugaccugg

SEQ ID NO: 1783 - RNA, 17 nt, Homo sapiens
caagugugaccuggcug

SEQ ID NO: 1784 - RNA, 17 nt, Homo sapiens
gugaccuggcugcacgc

SEQ ID NO: 1785 - RNA, 17 nt, Homo sapiens
accuggcugcacgcacu

SEQ ID NO: 1786 - RNA, 17 nt, Homo sapiens
cuggcugcacgcacugu

SEQ ID NO: 1787 - RNA, 17 nt, Homo sapiens
ggcugcacgcacugugg

SEQ ID NO: 1788 - RNA, 17 nt, Homo sapiens
cugcacgcacuguggaa

SEQ ID NO: 1789 - RNA, 17 nt, Homo sapiens
cacgcacuguggaaucu

SEQ ID NO: 1790 - RNA, 17 nt, Homo sapiens
acuguggaaucucggca

SEQ ID NO: 1791 - RNA, 17 nt, Homo sapiens
gaaucucggcaggcuca

SEQ ID NO: 1792 - RNA, 17 nt, Homo sapiens
cucggcaggcucaggac

SEQ ID NO: 1793 - RNA, 17 nt, Homo sapiens
ggcucaggaccucgccc

SEQ ID NO: 1794 - RNA, 17 nt, Homo sapiens
aggaccucgcccgaagc

SEQ ID NO: 1795 - RNA, 17 nt, Homo sapiens
cgcccgaagcuacggca

SEQ ID NO: 1796 - RNA, 17 nt, Homo sapiens
ccgaagcuacggcaucc

SEQ ID NO: 1797 - RNA, 17 nt, Homo sapiens
aagcuacggcauccccu

SEQ ID NO: 1798 - RNA, 17 nt, Homo sapiens
gcuacggcauccccuac

SEQ ID NO: 1799 - RNA, 17 nt, Homo sapiens
cauccccuacaucgaga

SEQ ID NO: 1800 - RNA, 17 nt, Homo sapiens
uccccuacaucgagacc

SEQ ID NO: 1801 - RNA, 17 nt, Homo sapiens
acaucgagaccucggcc

SEQ ID NO: 1802 - RNA, 17 nt, Homo sapiens
agaccucggccaagacc

SEQ ID NO: 1803 - RNA, 17 nt, Homo sapiens
cggccaagacccggcag

SEQ ID NO: 1804 - RNA, 17 nt, Homo sapiens
aagacccggcagggagu

SEQ ID NO: 1805 - RNA, 17 nt, Homo sapiens
ggcagggaguggaggau

SEQ ID NO: 1806 - RNA, 17 nt, Homo sapiens
aguggaggaugccuucu

SEQ ID NO: 1807 - RNA, 17 nt, Homo sapiens
uggaggaugccuucuac

SEQ ID NO: 1808 - RNA, 17 nt, Homo sapiens
ugccuucuacacguugg

SEQ ID NO: 1809 - RNA, 17 nt, Homo sapiens
ccuucuacacguuggug

SEQ ID NO: 1810 - RNA, 17 nt, Homo sapiens
uucuacacguuggugcg

SEQ ID NO: 1811 - RNA, 17 nt, Homo sapiens
acacguuggugcgugag

SEQ ID NO: 1812 - RNA, 17 nt, Homo sapiens
acguuggugcgugagau

SEQ ID NO: 1813 - RNA, 17 nt, Homo sapiens
guuggugcgugagaucc

SEQ ID NO: 1814 - RNA, 17 nt, Homo sapiens
ugcgugagauccggcag

SEQ ID NO: 1815 - RNA, 17 nt, Homo sapiens
gagauccggcagcacaa

SEQ ID NO: 1816 - RNA, 17 nt, Homo sapiens
auccggcagcacaagcu

SEQ ID NO: 1817 - RNA, 17 nt, Homo sapiens
ccggcagcacaagcugc

SEQ ID NO: 1818 - RNA, 17 nt, Homo sapiens
cagcacaagcugcggaa

SEQ ID NO: 1819 - RNA, 17 nt, Homo sapiens
cacaagcugcggaagcu

SEQ ID NO: 1820 - RNA, 17 nt, Homo sapiens
cugcggaagcugaaccc

SEQ ID NO: 1821 - RNA, 17 nt, Homo sapiens
gaagcugaacccuccug

SEQ ID NO: 1822 - RNA, 17 nt, Homo sapiens
cccuccugaugagagug

SEQ ID NO: 1823 - RNA, 17 nt, Homo sapiens
ugaugagaguggccccg

SEQ ID NO: 1824 - RNA, 17 nt, Homo sapiens
ugagaguggccccggcu

SEQ ID NO: 1825 - RNA, 17 nt, Homo sapiens
uggccccggcugcauga

SEQ ID NO: 1826 - RNA, 17 nt, Homo sapiens
ccccggcugcaugagcu

SEQ ID NO: 1827 - RNA, 17 nt, Homo sapiens
ccggcugcaugagcugc

SEQ ID NO: 1828 - RNA, 17 nt, Homo sapiens
cugcaugagcugcaagu

SEQ ID NO: 1829 - RNA, 17 nt, Homo sapiens
caugagcugcaagugug

SEQ ID NO: 1830 - RNA, 17 nt, Homo sapiens
agcugcaagugugugcu

SEQ ID NO: 1831 - RNA, 17 nt, Homo sapiens
cugcaagugugugcucu

SEQ ID NO: 1832 - RNA, 17 nt, Homo sapiens
gcaagugugugcucucc

SEQ ID NO: 1833 - RNA, 17 nt, Homo sapiens
aagugugugcucuccug

SEQ ID NO: 1834 - RNA, 17 nt, Homo sapiens
cucuccugacgcaggug

SEQ ID NO: 1835 - RNA, 17 nt, Homo sapiens
cuccugacgcaggugag

SEQ ID NO: 1836 - RNA, 17 nt, Homo sapiens
ugacgcaggugaggggg

SEQ ID NO: 1837 - RNA, 17 nt, Homo sapiens
ugagggggacucccagg

SEQ ID NO: 1838 - RNA, 17 nt, Homo sapiens
cucccagggcggccgcc

SEQ ID NO: 1839 - RNA, 17 nt, Homo sapiens
ccagggcggccgccacg

SEQ ID NO: 1840 - RNA, 17 nt, Homo sapiens
gggcggccgccacgccc

SEQ ID NO: 1841 - RNA, 17 nt, Homo sapiens
cggccgccacgcccacc

SEQ ID NO: 1842 - RNA, 17 nt, Homo sapiens
gccgccacgcccaccgg

SEQ ID NO: 1843 - RNA, 17 nt, Homo sapiens
ccacgcccaccggauga

SEQ ID NO: 1844 - RNA, 17 nt, Homo sapiens
cccaccggaugaccccg

SEQ ID NO: 1845 - RNA, 17 nt, Homo sapiens
accggaugaccccggcu

SEQ ID NO: 1846 - RNA, 17 nt, Homo sapiens
ugaccccggcuccccgc

SEQ ID NO: 1847 - RNA, 17 nt, Homo sapiens
ggcuccccgccccugcc

SEQ ID NO: 1848 - RNA, 17 nt, Homo sapiens
ccgccccugccggucuc

SEQ ID NO: 1849 - RNA, 17 nt, Homo sapiens
cccugccggucuccugg

SEQ ID NO: 1850 - RNA, 17 nt, Homo sapiens
gucuccuggccugcggu

SEQ ID NO: 1851 - RNA, 17 nt, Homo sapiens
ccuggccugcggucagc

SEQ ID NO: 1852 - RNA, 17 nt, Homo sapiens
ggccugcggucagcagc

SEQ ID NO: 1853 - RNA, 17 nt, Homo sapiens
ugcggucagcagccucc

SEQ ID NO: 1854 - RNA, 17 nt, Homo sapiens
ggucagcagccucccuu

SEQ ID NO: 1855 - RNA, 17 nt, Homo sapiens
ccucccuugugccccgc

SEQ ID NO: 1856 - RNA, 17 nt, Homo sapiens
ucccuugugccccgccc

SEQ ID NO: 1857 - RNA, 17 nt, Homo sapiens
ugugccccgcccagcac

SEQ ID NO: 1858 - RNA, 17 nt, Homo sapiens
cccgcccagcacaagcu

SEQ ID NO: 1859 - RNA, 17 nt, Homo sapiens
cgcccagcacaagcuca

SEQ ID NO: 1860 - RNA, 17 nt, Homo sapiens
cagcacaagcucaggac

SEQ ID NO: 1861 - RNA, 17 nt, Homo sapiens
agcucaggacauggagg

SEQ ID NO: 1862 - RNA, 17 nt, Homo sapiens
cucaggacauggaggug

SEQ ID NO: 1863 - RNA, 17 nt, Homo sapiens
acauggaggugccggau

SEQ ID NO: 1864 - RNA, 17 nt, Homo sapiens
auggaggugccggaugc

SEQ ID NO: 1865 - RNA, 17 nt, Homo sapiens
ggugccggaugcaggaa

SEQ ID NO: 1866 - RNA, 17 nt, Homo sapiens
ugccggaugcaggaagg

SEQ ID NO: 1867 - RNA, 17 nt, Homo sapiens
ggaaggaggugcagacg

SEQ ID NO: 1868 - RNA, 17 nt, Homo sapiens
aaggaggugcagacgga

SEQ ID NO: 1869 - RNA, 17 nt, Homo sapiens
aggugcagacggaagga

SEQ ID NO: 1870 - RNA, 17 nt, Homo sapiens
aaggaaggacggaagca

SEQ ID NO: 1871 - RNA, 17 nt, Homo sapiens
ggacggaagcaaggaag

SEQ ID NO: 1872 - RNA, 17 nt, Homo sapiens
aaggaagggcugcugga

SEQ ID NO: 1873 - RNA, 17 nt, Homo sapiens
gaagggcugcuggagcc

SEQ ID NO: 1874 - RNA, 17 nt, Homo sapiens
cugcuggagcccaguca

SEQ ID NO: 1875 - RNA, 17 nt, Homo sapiens
ggagcccagucaccccg

SEQ ID NO: 1876 - RNA, 17 nt, Homo sapiens
gcccagucaccccggga

SEQ ID NO: 1877 - RNA, 17 nt, Homo sapiens
accccgggaccgugggc

SEQ ID NO: 1878 - RNA, 17 nt, Homo sapiens
ccgggaccgugggccga

SEQ ID NO: 1879 - RNA, 17 nt, Homo sapiens
gaccgugggccgaggug

SEQ ID NO: 1880 - RNA, 17 nt, Homo sapiens
gggccgaggugacugca

SEQ ID NO: 1881 - RNA, 17 nt, Homo sapiens
ccgaggugacugcagac

SEQ ID NO: 1882 - RNA, 17 nt, Homo sapiens
aggugacugcagacccu

SEQ ID NO: 1883 - RNA, 17 nt, Homo sapiens
gacugcagacccuccca

SEQ ID NO: 1884 - RNA, 17 nt, Homo sapiens
ccagggaggcugugcac

SEQ ID NO: 1885 - RNA, 17 nt, Homo sapiens
gggaggcugugcacaga

SEQ ID NO: 1886 - RNA, 17 nt, Homo sapiens
gaggcugugcacagacu

SEQ ID NO: 1887 - RNA, 17 nt, Homo sapiens
ggcugugcacagacugu

SEQ ID NO: 1888 - RNA, 17 nt, Homo sapiens
gugcacagacugucuug

SEQ ID NO: 1889 - RNA, 17 nt, Homo sapiens
cacagacugucuugaac

SEQ ID NO: 1890 - RNA, 17 nt, Homo sapiens
ugucuugaacaucccaa

SEQ ID NO: 1891 - RNA, 17 nt, Homo sapiens
ucuugaacaucccaaau

SEQ ID NO: 1892 - RNA, 17 nt, Homo sapiens
caucccaaaugccaccg

SEQ ID NO: 1893 - RNA, 17 nt, Homo sapiens
ucccaaaugccaccgga

SEQ ID NO: 1894 - RNA, 17 nt, Homo sapiens
caaaugccaccggaacc

SEQ ID NO: 1895 - RNA, 17 nt, Homo sapiens
ccaccggaaccccagcc

SEQ ID NO: 1896 - RNA, 17 nt, Homo sapiens
gaaccccagcccuuagc

SEQ ID NO: 1897 - RNA, 17 nt, Homo sapiens
agcccuuagcuccccuc

SEQ ID NO: 1898 - RNA, 17 nt, Homo sapiens
ccucccaggccucugug

SEQ ID NO: 1899 - RNA, 17 nt, Homo sapiens
aggccucugugggcccu

SEQ ID NO: 1900 - RNA, 17 nt, Homo sapiens
cucugugggcccuuguc

SEQ ID NO: 1901 - RNA, 17 nt, Homo sapiens
gggcccuugucgggcac

SEQ ID NO: 1902 - RNA, 17 nt, Homo sapiens
cuugucgggcacagaug

SEQ ID NO: 1903 - RNA, 17 nt, Homo sapiens
ugucgggcacagauggg

SEQ ID NO: 1904 - RNA, 17 nt, Homo sapiens
gggcacagaugggauca

SEQ ID NO: 1905 - RNA, 17 nt, Homo sapiens
cagaugggaucacagua

SEQ ID NO: 1906 - RNA, 17 nt, Homo sapiens
augggaucacaguaaau

SEQ ID NO: 1907 - RNA, 17 nt, Homo sapiens
ggaucacaguaaauuau

SEQ ID NO: 1908 - RNA, 17 nt, Homo sapiens
cacaguaaauuauugga

SEQ ID NO: 1909 - RNA, 17 nt, Homo sapiens
aguaaauuauuggaugg

SEQ ID NO: 1910 - RNA, 17 nt, Homo sapiens
auuauuggauggucuug

SEQ ID NO: 1911 - RNA, 17 nt, Homo sapiens
auuggauggucuugauc

SEQ ID NO: 1912 - RNA, 17 nt, Homo sapiens
uggucuugaucuugguu

SEQ ID NO: 1913 - RNA, 17 nt, Homo sapiens
ugaucuugguuuucggc

SEQ ID NO: 1914 - RNA, 17 nt, Homo sapiens
gguuuucggcugagggu

SEQ ID NO: 1915 - RNA, 17 nt, Homo sapiens
ggcugagggugggacac

SEQ ID NO: 1916 - RNA, 17 nt, Homo sapiens
agggugggacacggugc

SEQ ID NO: 1917 - RNA, 17 nt, Homo sapiens
ggugggacacggugcgc

SEQ ID NO: 1918 - RNA, 17 nt, Homo sapiens
gggacacggugcgcgug

SEQ ID NO: 1919 - RNA, 17 nt, Homo sapiens
gacacggugcgcgugug

SEQ ID NO: 1920 - RNA, 17 nt, Homo sapiens
cacggugcgcguguggc

SEQ ID NO: 1921 - RNA, 17 nt, Homo sapiens
cggugcgcguguggccu

SEQ ID NO: 1922 - RNA, 17 nt, Homo sapiens
gugcgcguguggccugg

SEQ ID NO: 1923 - RNA, 17 nt, Homo sapiens
cgcguguggccuggcau

SEQ ID NO: 1924 - RNA, 17 nt, Homo sapiens
guggccuggcaugaggu

SEQ ID NO: 1925 - RNA, 17 nt, Homo sapiens
ggccuggcaugagguau

SEQ ID NO: 1926 - RNA, 17 nt, Homo sapiens
ggcaugagguaugucgg

SEQ ID NO: 1927 - RNA, 17 nt, Homo sapiens
caugagguaugucggaa

SEQ ID NO: 1928 - RNA, 17 nt, Homo sapiens
ugagguaugucggaacc

SEQ ID NO: 1929 - RNA, 17 nt, Homo sapiens
augucggaaccucaggc

SEQ ID NO: 1930 - RNA, 17 nt, Homo sapiens
aaccucaggccugucca

SEQ ID NO: 1931 - RNA, 17 nt, Homo sapiens
ucaggccuguccagccc

SEQ ID NO: 1932 - RNA, 17 nt, Homo sapiens
ccuguccagcccugggc

SEQ ID NO: 1933 - RNA, 17 nt, Homo sapiens
agcccugggcucuccau

SEQ ID NO: 1934 - RNA, 17 nt, Homo sapiens
ggcucuccauagccuuu

SEQ ID NO: 1935 - RNA, 17 nt, Homo sapiens
ucuccauagccuuuggg

SEQ ID NO: 1936 - RNA, 17 nt, Homo sapiens
agggggagguugggaga

SEQ ID NO: 1937 - RNA, 17 nt, Homo sapiens
ugggagaggccggucag

SEQ ID NO: 1938 - RNA, 17 nt, Homo sapiens
agaggccggucaggggu

SEQ ID NO: 1939 - RNA, 17 nt, Homo sapiens
ggucaggggucugggcu

SEQ ID NO: 1940 - RNA, 17 nt, Homo sapiens
gggucugggcuguggug

SEQ ID NO: 1941 - RNA, 17 nt, Homo sapiens
ucugggcuguggugcuc

SEQ ID NO: 1942 - RNA, 17 nt, Homo sapiens
gggcuguggugcucucu

SEQ ID NO: 1943 - RNA, 17 nt, Homo sapiens
gcuguggugcucucucc

SEQ ID NO: 1944 - RNA, 17 nt, Homo sapiens
cuccucccgccugcccc

SEQ ID NO: 1945 - RNA, 17 nt, Homo sapiens
ucccgccugccccagug

SEQ ID NO: 1946 - RNA, 17 nt, Homo sapiens
cugccccaguguccacg

SEQ ID NO: 1947 - RNA, 17 nt, Homo sapiens
gccccaguguccacggc

SEQ ID NO: 1948 - RNA, 17 nt, Homo sapiens
caguguccacggcuucu

SEQ ID NO: 1949 - RNA, 17 nt, Homo sapiens
uguccacggcuucuggc

SEQ ID NO: 1950 - RNA, 17 nt, Homo sapiens
ggcuucuggcagagagc

SEQ ID NO: 1951 - RNA, 17 nt, Homo sapiens
ggcagagagcucuggac

SEQ ID NO: 1952 - RNA, 17 nt, Homo sapiens
agcucuggacaagcagg

SEQ ID NO: 1953 - RNA, 17 nt, Homo sapiens
cuggacaagcaggcaga

SEQ ID NO: 1954 - RNA, 17 nt, Homo sapiens
acaagcaggcagaucau

SEQ ID NO: 1955 - RNA, 17 nt, Homo sapiens
gcaggcagaucauaagg

SEQ ID NO: 1956 - RNA, 17 nt, Homo sapiens
ggcagaucauaaggaca

SEQ ID NO: 1957 - RNA, 17 nt, Homo sapiens
ucauaaggacagagagc

SEQ ID NO: 1958 - RNA, 17 nt, Homo sapiens
gacagagagcuuacugu

SEQ ID NO: 1959 - RNA, 17 nt, Homo sapiens
gagagcuuacugugcuu

SEQ ID NO: 1960 - RNA, 17 nt, Homo sapiens
agcuuacugugcuucua

SEQ ID NO: 1961 - RNA, 17 nt, Homo sapiens
cuuacugugcuucuacc

SEQ ID NO: 1962 - RNA, 17 nt, Homo sapiens
gugcuucuaccaacuag

SEQ ID NO: 1963 - RNA, 17 nt, Homo sapiens
uucuaccaacuaggagg

SEQ ID NO: 1964 - RNA, 17 nt, Homo sapiens
cuaggagggcguccugg

SEQ ID NO: 1965 - RNA, 17 nt, Homo sapiens
aggagggcguccugguc

SEQ ID NO: 1966 - RNA, 17 nt, Homo sapiens
gcguccugguccuccag

SEQ ID NO: 1967 - RNA, 17 nt, Homo sapiens
agagggaggugguuuca

SEQ ID NO: 1968 - RNA, 17 nt, Homo sapiens
gggaggugguuucaggg

SEQ ID NO: 1969 - RNA, 17 nt, Homo sapiens
uuucagggguuggggau

SEQ ID NO: 1970 - RNA, 17 nt, Homo sapiens
gguuggggaucugugcc

SEQ ID NO: 1971 - RNA, 17 nt, Homo sapiens
ggggaucugugccggug

SEQ ID NO: 1972 - RNA, 17 nt, Homo sapiens
ggaucugugccgguggc

SEQ ID NO: 1973 - RNA, 17 nt, Homo sapiens
cugugccgguggcucug

SEQ ID NO: 1974 - RNA, 17 nt, Homo sapiens
ugccgguggcucugguc

SEQ ID NO: 1975 - RNA, 17 nt, Homo sapiens
uggcucuggucucugcu

SEQ ID NO: 1976 - RNA, 17 nt, Homo sapiens
uggucucugcugggagc

SEQ ID NO: 1977 - RNA, 17 nt, Homo sapiens
ugcugggagccuucuug

SEQ ID NO: 1978 - RNA, 17 nt, Homo sapiens
ccuucuuggcggugaga

SEQ ID NO: 1979 - RNA, 17 nt, Homo sapiens
ucuuggcggugagaggc

SEQ ID NO: 1980 - RNA, 17 nt, Homo sapiens
ggugagaggcaucaccu

SEQ ID NO: 1981 - RNA, 17 nt, Homo sapiens
ugagaggcaucaccuuu

SEQ ID NO: 1982 - RNA, 17 nt, Homo sapiens
gaggcaucaccuuuccu

SEQ ID NO: 1983 - RNA, 17 nt, Homo sapiens
cuuuccugacuugcucc

SEQ ID NO: 1984 - RNA, 17 nt, Homo sapiens
ccugacuugcucccagc

SEQ ID NO: 1985 - RNA, 17 nt, Homo sapiens
ugcucccagcgugaaau

SEQ ID NO: 1986 - RNA, 17 nt, Homo sapiens
cucccagcgugaaaugc

SEQ ID NO: 1987 - RNA, 17 nt, Homo sapiens
agcgugaaaugcaccug

SEQ ID NO: 1988 - RNA, 17 nt, Homo sapiens
cgugaaaugcaccugcc

SEQ ID NO: 1989 - RNA, 17 nt, Homo sapiens
ugaaaugcaccugccaa

SEQ ID NO: 1990 - RNA, 17 nt, Homo sapiens
augcaccugccaagaau

SEQ ID NO: 1991 - RNA, 17 nt, Homo sapiens
ugccaagaauggcagac

SEQ ID NO: 1992 - RNA, 17 nt, Homo sapiens
caagaauggcagacaua

SEQ ID NO: 1993 - RNA, 17 nt, Homo sapiens
aauggcagacauaggga

SEQ ID NO: 1994 - RNA, 17 nt, Homo sapiens
uggcagacauagggacc

SEQ ID NO: 1995 - RNA, 17 nt, Homo sapiens
acauagggaccccgccu

SEQ ID NO: 1996 - RNA, 17 nt, Homo sapiens
gggaccccgccuccugg

SEQ ID NO: 1997 - RNA, 17 nt, Homo sapiens
ccuccugggccuucaca

SEQ ID NO: 1998 - RNA, 17 nt, Homo sapiens
gggccuucacaugccca

SEQ ID NO: 1999 - RNA, 17 nt, Homo sapiens
gccuucacaugcccagu

SEQ ID NO: 2000 - RNA, 17 nt, Homo sapiens
cuucacaugcccaguuu

SEQ ID NO: 2001 - RNA, 17 nt, Homo sapiens
caugcccaguuuucuuc

SEQ ID NO: 2002 - RNA, 17 nt, Homo sapiens
uuucuucggcucugugg

SEQ ID NO: 2003 - RNA, 17 nt, Homo sapiens
ucggcucuguggccuga

SEQ ID NO: 2004 - RNA, 17 nt, Homo sapiens
gcucuguggccugaagc

SEQ ID NO: 2005 - RNA, 17 nt, Homo sapiens
ggccugaagcggucugu

SEQ ID NO: 2006 - RNA, 17 nt, Homo sapiens
cugaagcggucugugga

SEQ ID NO: 2007 - RNA, 17 nt, Homo sapiens
agcggucuguggaccuu

SEQ ID NO: 2008 - RNA, 17 nt, Homo sapiens
gucuguggaccuuggaa

SEQ ID NO: 2009 - RNA, 17 nt, Homo sapiens
ccuuggaaguagggcuc

SEQ ID NO: 2010 - RNA, 17 nt, Homo sapiens
gaaguagggcuccagca

SEQ ID NO: 2011 - RNA, 17 nt, Homo sapiens
gggcuccagcaccgacu

SEQ ID NO: 2012 - RNA, 17 nt, Homo sapiens
gcuccagcaccgacugg

SEQ ID NO: 2013 - RNA, 17 nt, Homo sapiens
cagcaccgacuggccuc

SEQ ID NO: 2014 - RNA, 17 nt, Homo sapiens
accgacuggccucaggc

SEQ ID NO: 2015 - RNA, 17 nt, Homo sapiens
ggccucaggccucugcc

SEQ ID NO: 2016 - RNA, 17 nt, Homo sapiens
aggccucugccucauug

SEQ ID NO: 2017 - RNA, 17 nt, Homo sapiens
ucugccucauugguggu

SEQ ID NO: 2018 - RNA, 17 nt, Homo sapiens
ccucauugguggucggg

SEQ ID NO: 2019 - RNA, 17 nt, Homo sapiens
cauugguggucggguag

SEQ ID NO: 2020 - RNA, 17 nt, Homo sapiens
guggucggguagcggcc

SEQ ID NO: 2021 - RNA, 17 nt, Homo sapiens
gucggguagcggccagu

SEQ ID NO: 2022 - RNA, 17 nt, Homo sapiens
ggguagcggccaguagg

SEQ ID NO: 2023 - RNA, 17 nt, Homo sapiens
agcggccaguagggcgu

SEQ ID NO: 2024 - RNA, 17 nt, Homo sapiens
ccaguagggcgugggag

SEQ ID NO: 2025 - RNA, 17 nt, Homo sapiens
aguagggcgugggagcc

SEQ ID NO: 2026 - RNA, 17 nt, Homo sapiens
gcgugggagccuggcca

SEQ ID NO: 2027 - RNA, 17 nt, Homo sapiens
ggagccuggccaucccu

SEQ ID NO: 2028 - RNA, 17 nt, Homo sapiens
gccuggccaucccugcc

SEQ ID NO: 2029 - RNA, 17 nt, Homo sapiens
ccaucccugccuccugg

SEQ ID NO: 2030 - RNA, 17 nt, Homo sapiens
cuccuggaguggacgag

SEQ ID NO: 2031 - RNA, 17 nt, Homo sapiens
uggaguggacgagguug

SEQ ID NO: 2032 - RNA, 17 nt, Homo sapiens
uggacgagguuggcagc

SEQ ID NO: 2033 - RNA, 17 nt, Homo sapiens
cgagguuggcagcuggu

SEQ ID NO: 2034 - RNA, 17 nt, Homo sapiens
gguuggcagcugguccg

SEQ ID NO: 2035 - RNA, 17 nt, Homo sapiens
ggcagcugguccgucug

SEQ ID NO: 2036 - RNA, 17 nt, Homo sapiens
gcugguccgucugcucc

SEQ ID NO: 2037 - RNA, 17 nt, Homo sapiens
guccgucugcuccugcc

SEQ ID NO: 2038 - RNA, 17 nt, Homo sapiens
cugcuccugccccacuc

SEQ ID NO: 2039 - RNA, 17 nt, Homo sapiens
ccugccccacucucccc

SEQ ID NO: 2040 - RNA, 17 nt, Homo sapiens
ucucccccgccccugcc

SEQ ID NO: 2041 - RNA, 17 nt, Homo sapiens
ccgccccugcccucacc

SEQ ID NO: 2042 - RNA, 17 nt, Homo sapiens
cugcccucacccuaccc

SEQ ID NO: 2043 - RNA, 17 nt, Homo sapiens
cucacccuacccuugcc

SEQ ID NO: 2044 - RNA, 17 nt, Homo sapiens
cuacccuugccccacgc

SEQ ID NO: 2045 - RNA, 17 nt, Homo sapiens
cuugccccacgccugcc

SEQ ID NO: 2046 - RNA, 17 nt, Homo sapiens
ugccccacgccugccuc

SEQ ID NO: 2047 - RNA, 17 nt, Homo sapiens
ccacgccugccucaugg

SEQ ID NO: 2048 - RNA, 17 nt, Homo sapiens
ccugccucauggcuggu

SEQ ID NO: 2049 - RNA, 17 nt, Homo sapiens
gccucauggcugguugc

SEQ ID NO: 2050 - RNA, 17 nt, Homo sapiens
cauggcugguugcucuu

SEQ ID NO: 2051 - RNA, 17 nt, Homo sapiens
ggcugguugcucuugga

SEQ ID NO: 2052 - RNA, 17 nt, Homo sapiens
cucuuggagccugguag

SEQ ID NO: 2053 - RNA, 17 nt, Homo sapiens
ggagccugguaguguca

SEQ ID NO: 2054 - RNA, 17 nt, Homo sapiens
gccugguagugucacug

SEQ ID NO: 2055 - RNA, 17 nt, Homo sapiens
cugguagugucacuggc

SEQ ID NO: 2056 - RNA, 17 nt, Homo sapiens
guagugucacuggcuca

SEQ ID NO: 2057 - RNA, 17 nt, Homo sapiens
ugucacuggcucagccu

SEQ ID NO: 2058 - RNA, 17 nt, Homo sapiens
cuggcucagccuugcug

SEQ ID NO: 2059 - RNA, 17 nt, Homo sapiens
ucagccuugcuggguau

SEQ ID NO: 2060 - RNA, 17 nt, Homo sapiens
cuugcuggguauacaca

SEQ ID NO: 2061 - RNA, 17 nt, Homo sapiens
ugcuggguauacacagg

SEQ ID NO: 2062 - RNA, 17 nt, Homo sapiens
cuggguauacacaggcu

SEQ ID NO: 2063 - RNA, 17 nt, Homo sapiens
ggguauacacaggcucu

SEQ ID NO: 2064 - RNA, 17 nt, Homo sapiens
auacacaggcucugcca

SEQ ID NO: 2065 - RNA, 17 nt, Homo sapiens
caggcucugccacccac

SEQ ID NO: 2066 - RNA, 17 nt, Homo sapiens
gcucugccacccacucu

SEQ ID NO: 2067 - RNA, 17 nt, Homo sapiens
ugccacccacucugcuc

SEQ ID NO: 2068 - RNA, 17 nt, Homo sapiens
cccacucugcuccaagg

SEQ ID NO: 2069 - RNA, 17 nt, Homo sapiens
uccaaggggcuugcccu

SEQ ID NO: 2070 - RNA, 17 nt, Homo sapiens
aggggcuugcccugccu

SEQ ID NO: 2071 - RNA, 17 nt, Homo sapiens
cuugcccugccuugggc

SEQ ID NO: 2072 - RNA, 17 nt, Homo sapiens
ugccuugggccaaguuc

SEQ ID NO: 2073 - RNA, 17 nt, Homo sapiens
ugggccaaguucuaggu

SEQ ID NO: 2074 - RNA, 17 nt, Homo sapiens
aguucuaggucuggcca

SEQ ID NO: 2075 - RNA, 17 nt, Homo sapiens
uaggucuggccacagcc

SEQ ID NO: 2076 - RNA, 17 nt, Homo sapiens
gucuggccacagccaca

SEQ ID NO: 2077 - RNA, 17 nt, Homo sapiens
uggccacagccacagac

SEQ ID NO: 2078 - RNA, 17 nt, Homo sapiens
ccacagccacagacagc

SEQ ID NO: 2079 - RNA, 17 nt, Homo sapiens
agccacagacagcucag

SEQ ID NO: 2080 - RNA, 17 nt, Homo sapiens
cacagacagcucagucc

SEQ ID NO: 2081 - RNA, 17 nt, Homo sapiens
acagcucaguccccugu

SEQ ID NO: 2082 - RNA, 17 nt, Homo sapiens
aguccccugugugguca

SEQ ID NO: 2083 - RNA, 17 nt, Homo sapiens
uccccuguguggucauc

SEQ ID NO: 2084 - RNA, 17 nt, Homo sapiens
ccuguguggucauccug

SEQ ID NO: 2085 - RNA, 17 nt, Homo sapiens
guguggucauccuggcu

SEQ ID NO: 2086 - RNA, 17 nt, Homo sapiens
ucauccuggcuucugcu

SEQ ID NO: 2087 - RNA, 17 nt, Homo sapiens
uggcuucugcugggggc

SEQ ID NO: 2088 - RNA, 17 nt, Homo sapiens
ugcugggggcccacagc

SEQ ID NO: 2089 - RNA, 17 nt, Homo sapiens
gggggcccacagcgccc

SEQ ID NO: 2090 - RNA, 17 nt, Homo sapiens
ggcccacagcgccccug

SEQ ID NO: 2091 - RNA, 17 nt, Homo sapiens
cccacagcgccccuggu

SEQ ID NO: 2092 - RNA, 17 nt, Homo sapiens
cgccccuggugccccuc

SEQ ID NO: 2093 - RNA, 17 nt, Homo sapiens
ccccuggugccccuccc

SEQ ID NO: 2094 - RNA, 17 nt, Homo sapiens
cucccagggcccggguu

SEQ ID NO: 2095 - RNA, 17 nt, Homo sapiens
gggcccggguugaggcu

SEQ ID NO: 2096 - RNA, 17 nt, Homo sapiens
ggguugaggcugggcca

SEQ ID NO: 2097 - RNA, 17 nt, Homo sapiens
gaggcugggccaggccc

SEQ ID NO: 2098 - RNA, 17 nt, Homo sapiens
ugggccaggcccucugg

SEQ ID NO: 2099 - RNA, 17 nt, Homo sapiens
ccucugggacggggacu

SEQ ID NO: 2100 - RNA, 17 nt, Homo sapiens
ggacggggacuugugcc

SEQ ID NO: 2101 - RNA, 17 nt, Homo sapiens
ggggacuugugcccugu

SEQ ID NO: 2102 - RNA, 17 nt, Homo sapiens
ggacuugugcccuguca

SEQ ID NO: 2103 - RNA, 17 nt, Homo sapiens
ugugcccugucaggguu

SEQ ID NO: 2104 - RNA, 17 nt, Homo sapiens
cugucaggguucccuau

SEQ ID NO: 2105 - RNA, 17 nt, Homo sapiens
gguucccuaucccugag

SEQ ID NO: 2106 - RNA, 17 nt, Homo sapiens
ucccugagguuggggga

SEQ ID NO: 2107 - RNA, 17 nt, Homo sapiens
gggggagagcuagcagg

SEQ ID NO: 2108 - RNA, 17 nt, Homo sapiens
gagagcuagcagggcau

SEQ ID NO: 2109 - RNA, 17 nt, Homo sapiens
cuagcagggcaugccgc

SEQ ID NO: 2110 - RNA, 17 nt, Homo sapiens
agcagggcaugccgcug

SEQ ID NO: 2111 - RNA, 17 nt, Homo sapiens
cagggcaugccgcuggc

SEQ ID NO: 2112 - RNA, 17 nt, Homo sapiens
ggcaugccgcuggcugg

SEQ ID NO: 2113 - RNA, 17 nt, Homo sapiens
ugccgcuggcuggccag

SEQ ID NO: 2114 - RNA, 17 nt, Homo sapiens
gcuggcuggccagggcu

SEQ ID NO: 2115 - RNA, 17 nt, Homo sapiens
uggccagggcugcaggg

SEQ ID NO: 2116 - RNA, 17 nt, Homo sapiens
ccagggcugcagggaca

SEQ ID NO: 2117 - RNA, 17 nt, Homo sapiens
cugcagggacacucccc

SEQ ID NO: 2118 - RNA, 17 nt, Homo sapiens
gcagggacacucccccu

SEQ ID NO: 2119 - RNA, 17 nt, Homo sapiens
ccccuuuuguccaggga

SEQ ID NO: 2120 - RNA, 17 nt, Homo sapiens
uccagggaauaccacac

SEQ ID NO: 2121 - RNA, 17 nt, Homo sapiens
cagggaauaccacacuc

SEQ ID NO: 2122 - RNA, 17 nt, Homo sapiens
ggaauaccacacucgcc

SEQ ID NO: 2123 - RNA, 17 nt, Homo sapiens
aauaccacacucgcccu

SEQ ID NO: 2124 - RNA, 17 nt, Homo sapiens
ccacacucgcccuucuc

SEQ ID NO: 2125 - RNA, 17 nt, Homo sapiens
ucucuccagcgaacacc

SEQ ID NO: 2126 - RNA, 17 nt, Homo sapiens
uccagcgaacaccacac

SEQ ID NO: 2127 - RNA, 17 nt, Homo sapiens
cagcgaacaccacacuc

SEQ ID NO: 2128 - RNA, 17 nt, Homo sapiens
cgaacaccacacucgcc

SEQ ID NO: 2129 - RNA, 17 nt, Homo sapiens
aacaccacacucgcccu

SEQ ID NO: 2130 - RNA, 17 nt, Homo sapiens
uccaggggacgccacac

SEQ ID NO: 2131 - RNA, 17 nt, Homo sapiens
caggggacgccacacuc

SEQ ID NO: 2132 - RNA, 17 nt, Homo sapiens
gggacgccacacucccc

SEQ ID NO: 2133 - RNA, 17 nt, Homo sapiens
gacgccacacucccccu

SEQ ID NO: 2134 - RNA, 17 nt, Homo sapiens
ccccuucuguccagggg

SEQ ID NO: 2135 - RNA, 17 nt, Homo sapiens
gggacgccacacucgcc

SEQ ID NO: 2136 - RNA, 17 nt, Homo sapiens
gacgccacacucgcccu

SEQ ID NO: 2137 - RNA, 17 nt, Homo sapiens
ccacacucgcccuucug

SEQ ID NO: 2138 - RNA, 17 nt, Homo sapiens
gcccuucuguccagggg

SEQ ID NO: 2139 - RNA, 17 nt, Homo sapiens
caggggacgccacacuu

SEQ ID NO: 2140 - RNA, 17 nt, Homo sapiens
gggacgccacacuugcc

SEQ ID NO: 2141 - RNA, 17 nt, Homo sapiens
gacgccacacuugcccu

SEQ ID NO: 2142 - RNA, 17 nt, Homo sapiens
ccacacuugcccuucug

SEQ ID NO: 2143 - RNA, 17 nt, Homo sapiens
gcccuucuguccaggga

SEQ ID NO: 2144 - RNA, 17 nt, Homo sapiens
uccagggaaugccacac

SEQ ID NO: 2145 - RNA, 17 nt, Homo sapiens
cagggaaugccacacuc

SEQ ID NO: 2146 - RNA, 17 nt, Homo sapiens
ggaaugccacacucccc

SEQ ID NO: 2147 - RNA, 17 nt, Homo sapiens
aaugccacacucccccu

SEQ ID NO: 2148 - RNA, 17 nt, Homo sapiens
ucuccccagcagccucc

SEQ ID NO: 2149 - RNA, 17 nt, Homo sapiens
ccccagcagccuccgag

SEQ ID NO: 2150 - RNA, 17 nt, Homo sapiens
gccuccgagugaccagc

SEQ ID NO: 2151 - RNA, 17 nt, Homo sapiens
uccgagugaccagcuuc

SEQ ID NO: 2152 - RNA, 17 nt, Homo sapiens
agugaccagcuucccca

SEQ ID NO: 2153 - RNA, 17 nt, Homo sapiens
gcuuccccaucgauaga

SEQ ID NO: 2154 - RNA, 17 nt, Homo sapiens
ccccaucgauagacuuc

SEQ ID NO: 2155 - RNA, 17 nt, Homo sapiens
aucgauagacuucccga

SEQ ID NO: 2156 - RNA, 17 nt, Homo sapiens
uucccgaggccaggagc

SEQ ID NO: 2157 - RNA, 17 nt, Homo sapiens
ggccaggagcccucuag

SEQ ID NO: 2158 - RNA, 17 nt, Homo sapiens
ccucuagggcugccggg

SEQ ID NO: 2159 - RNA, 17 nt, Homo sapiens
cuagggcugccgggugc

SEQ ID NO: 2160 - RNA, 17 nt, Homo sapiens
gcugccgggugccaccc

SEQ ID NO: 2161 - RNA, 17 nt, Homo sapiens
ugccgggugccacccug

SEQ ID NO: 2162 - RNA, 17 nt, Homo sapiens
cgggugccacccuggcu

SEQ ID NO: 2163 - RNA, 17 nt, Homo sapiens
ccacccuggcuccuucc

SEQ ID NO: 2164 - RNA, 17 nt, Homo sapiens
cuccuuccacaccgugc

SEQ ID NO: 2165 - RNA, 17 nt, Homo sapiens
ccuuccacaccgugcug

SEQ ID NO: 2166 - RNA, 17 nt, Homo sapiens
uccacaccgugcugguc

SEQ ID NO: 2167 - RNA, 17 nt, Homo sapiens
cacaccgugcuggucac

SEQ ID NO: 2168 - RNA, 17 nt, Homo sapiens
ccgugcuggucacugcc

SEQ ID NO: 2169 - RNA, 17 nt, Homo sapiens
ugcuggucacugccugc

SEQ ID NO: 2170 - RNA, 17 nt, Homo sapiens
uggucacugccugcugg

SEQ ID NO: 2171 - RNA, 17 nt, Homo sapiens
cacugccugcugggggc

SEQ ID NO: 2172 - RNA, 17 nt, Homo sapiens
ugcugggggcgucagau

SEQ ID NO: 2173 - RNA, 17 nt, Homo sapiens
cugggggcgucagaugc

SEQ ID NO: 2174 - RNA, 17 nt, Homo sapiens
ggcgucagaugcaggug

SEQ ID NO: 2175 - RNA, 17 nt, Homo sapiens
cgucagaugcaggugac

SEQ ID NO: 2176 - RNA, 17 nt, Homo sapiens
agaugcaggugacccug

SEQ ID NO: 2177 - RNA, 17 nt, Homo sapiens
ugcaggugacccugugc

SEQ ID NO: 2178 - RNA, 17 nt, Homo sapiens
gugacccugugcaggag

SEQ ID NO: 2179 - RNA, 17 nt, Homo sapiens
gacccugugcaggaggu

SEQ ID NO: 2180 - RNA, 17 nt, Homo sapiens
ugcaggagguaucucug

SEQ ID NO: 2181 - RNA, 17 nt, Homo sapiens
caggagguaucucugga

SEQ ID NO: 2182 - RNA, 17 nt, Homo sapiens
aucucuggaccugccuc

SEQ ID NO: 2183 - RNA, 17 nt, Homo sapiens
cuggaccugccucuugg

SEQ ID NO: 2184 - RNA, 17 nt, Homo sapiens
gccucuuggucauuacg

SEQ ID NO: 2185 - RNA, 17 nt, Homo sapiens
ucuuggucauuacgggg

SEQ ID NO: 2186 - RNA, 17 nt, Homo sapiens
uggucauuacggggcug

SEQ ID NO: 2187 - RNA, 17 nt, Homo sapiens
auuacggggcugggcag

SEQ ID NO: 2188 - RNA, 17 nt, Homo sapiens
ggggcugggcagggccu

SEQ ID NO: 2189 - RNA, 17 nt, Homo sapiens
ugggcagggccugguau

SEQ ID NO: 2190 - RNA, 17 nt, Homo sapiens
agggccugguaucaggg

SEQ ID NO: 2191 - RNA, 17 nt, Homo sapiens
ggccugguaucagggcc

SEQ ID NO: 2192 - RNA, 17 nt, Homo sapiens
guaucagggccccgcug

SEQ ID NO: 2193 - RNA, 17 nt, Homo sapiens
agggccccgcugggguu

SEQ ID NO: 2194 - RNA, 17 nt, Homo sapiens
ccgcugggguugcaggg

SEQ ID NO: 2195 - RNA, 17 nt, Homo sapiens
cugggguugcagggcug

SEQ ID NO: 2196 - RNA, 17 nt, Homo sapiens
guugcagggcugggccu

SEQ ID NO: 2197 - RNA, 17 nt, Homo sapiens
agggcugggccugugcu

SEQ ID NO: 2198 - RNA, 17 nt, Homo sapiens
cugggccugugcugugg

SEQ ID NO: 2199 - RNA, 17 nt, Homo sapiens
gggccugugcugugguc

SEQ ID NO: 2200 - RNA, 17 nt, Homo sapiens
ccugugcugugguccug

SEQ ID NO: 2201 - RNA, 17 nt, Homo sapiens
gugcugugguccugggg

SEQ ID NO: 2202 - RNA, 17 nt, Homo sapiens
guccugggguguccagg

SEQ ID NO: 2203 - RNA, 17 nt, Homo sapiens
ccugggguguccaggac

SEQ ID NO: 2204 - RNA, 17 nt, Homo sapiens
uguccaggacagacgug

SEQ ID NO: 2205 - RNA, 17 nt, Homo sapiens
caggacagacguggagg

SEQ ID NO: 2206 - RNA, 17 nt, Homo sapiens
ggacagacguggagggg

SEQ ID NO: 2207 - RNA, 17 nt, Homo sapiens
guggaggggucagggcc

SEQ ID NO: 2208 - RNA, 17 nt, Homo sapiens
gggucagggcccagcac

SEQ ID NO: 2209 - RNA, 17 nt, Homo sapiens
agggcccagcaccccug

SEQ ID NO: 2210 - RNA, 17 nt, Homo sapiens
ggcccagcaccccugcu

SEQ ID NO: 2211 - RNA, 17 nt, Homo sapiens
gcaccccugcuccaugc

SEQ ID NO: 2212 - RNA, 17 nt, Homo sapiens
ccugcuccaugcugaac

SEQ ID NO: 2213 - RNA, 17 nt, Homo sapiens
ugcuccaugcugaacug

SEQ ID NO: 2214 - RNA, 17 nt, Homo sapiens
caugcugaacuguggga

SEQ ID NO: 2215 - RNA, 17 nt, Homo sapiens
gcugaacugugggaagc

SEQ ID NO: 2216 - RNA, 17 nt, Homo sapiens
ugugggaagcauccagg

SEQ ID NO: 2217 - RNA, 17 nt, Homo sapiens
ugggaagcauccagguc

SEQ ID NO: 2218 - RNA, 17 nt, Homo sapiens
gcauccaggucccuggg

SEQ ID NO: 2219 - RNA, 17 nt, Homo sapiens
gucccuggguggcuuca

SEQ ID NO: 2220 - RNA, 17 nt, Homo sapiens
ccuggguggcuucaaca

SEQ ID NO: 2221 - RNA, 17 nt, Homo sapiens
uggcuucaacaggaguu

SEQ ID NO: 2222 - RNA, 17 nt, Homo sapiens
caacaggaguuccagca

SEQ ID NO: 2223 - RNA, 17 nt, Homo sapiens
gaguuccagcacgggaa

SEQ ID NO: 2224 - RNA, 17 nt, Homo sapiens
guuccagcacgggaacc

SEQ ID NO: 2225 - RNA, 17 nt, Homo sapiens
gcacgggaaccacugga

SEQ ID NO: 2226 - RNA, 17 nt, Homo sapiens
cgggaaccacuggacaa

SEQ ID NO: 2227 - RNA, 17 nt, Homo sapiens
accacuggacaaccugg

SEQ ID NO: 2228 - RNA, 17 nt, Homo sapiens
acuggacaaccuggggu

SEQ ID NO: 2229 - RNA, 17 nt, Homo sapiens
aaccugggguguguccu

SEQ ID NO: 2230 - RNA, 17 nt, Homo sapiens
ccugggguguguccuga

SEQ ID NO: 2231 - RNA, 17 nt, Homo sapiens
ugggguguguccugauc

SEQ ID NO: 2232 - RNA, 17 nt, Homo sapiens
guguccugaucugggga

SEQ ID NO: 2233 - RNA, 17 nt, Homo sapiens
aucuggggacaggccag

SEQ ID NO: 2234 - RNA, 17 nt, Homo sapiens
ggggacaggccagccac

SEQ ID NO: 2235 - RNA, 17 nt, Homo sapiens
acaggccagccacaccc

SEQ ID NO: 2236 - RNA, 17 nt, Homo sapiens
ggccagccacaccccga

SEQ ID NO: 2237 - RNA, 17 nt, Homo sapiens
ccagccacaccccgagu

SEQ ID NO: 2238 - RNA, 17 nt, Homo sapiens
caccccgaguccuaggg

SEQ ID NO: 2239 - RNA, 17 nt, Homo sapiens
uccuagggacuccagag

SEQ ID NO: 2240 - RNA, 17 nt, Homo sapiens
uccagagagcagcccac

SEQ ID NO: 2241 - RNA, 17 nt, Homo sapiens
agagagcagcccacugc

SEQ ID NO: 2242 - RNA, 17 nt, Homo sapiens
agcagcccacugcccug

SEQ ID NO: 2243 - RNA, 17 nt, Homo sapiens
agcccacugcccugggc

SEQ ID NO: 2244 - RNA, 17 nt, Homo sapiens
ugcccugggcuccacgg

SEQ ID NO: 2245 - RNA, 17 nt, Homo sapiens
ugggcuccacggaagcc

SEQ ID NO: 2246 - RNA, 17 nt, Homo sapiens
ccacggaagcccccuca

SEQ ID NO: 2247 - RNA, 17 nt, Homo sapiens
gcccccucaugccgcua

SEQ ID NO: 2248 - RNA, 17 nt, Homo sapiens
ccccucaugccgcuagg

SEQ ID NO: 2249 - RNA, 17 nt, Homo sapiens
cucaugccgcuaggccu

SEQ ID NO: 2250 - RNA, 17 nt, Homo sapiens
gccgcuaggccuuggcc

SEQ ID NO: 2251 - RNA, 17 nt, Homo sapiens
aggccuuggccucgggg

SEQ ID NO: 2252 - RNA, 17 nt, Homo sapiens
ccucggggacagcccag

SEQ ID NO: 2253 - RNA, 17 nt, Homo sapiens
cggggacagcccagcua

SEQ ID NO: 2254 - RNA, 17 nt, Homo sapiens
acagcccagcuaggcca

SEQ ID NO: 2255 - RNA, 17 nt, Homo sapiens
ccagcuaggccagugug

SEQ ID NO: 2256 - RNA, 17 nt, Homo sapiens
cuaggccaguguguggc

SEQ ID NO: 2257 - RNA, 17 nt, Homo sapiens
aggccaguguguggcag

SEQ ID NO: 2258 - RNA, 17 nt, Homo sapiens
gccaguguguggcagga

SEQ ID NO: 2259 - RNA, 17 nt, Homo sapiens
aguguguggcaggacca

SEQ ID NO: 2260 - RNA, 17 nt, Homo sapiens
guggcaggaccaggccc

SEQ ID NO: 2261 - RNA, 17 nt, Homo sapiens
aggaccaggcccccaug

SEQ ID NO: 2262 - RNA, 17 nt, Homo sapiens
aggcccccaugugggag

SEQ ID NO: 2263 - RNA, 17 nt, Homo sapiens
gcccccaugugggagcu

SEQ ID NO: 2264 - RNA, 17 nt, Homo sapiens
augugggagcugacccc

SEQ ID NO: 2265 - RNA, 17 nt, Homo sapiens
gggagcugaccccuugg

SEQ ID NO: 2266 - RNA, 17 nt, Homo sapiens
cccuugggauucuggag

SEQ ID NO: 2267 - RNA, 17 nt, Homo sapiens
auucuggagcugugcug

SEQ ID NO: 2268 - RNA, 17 nt, Homo sapiens
cuggagcugugcugaug

SEQ ID NO: 2269 - RNA, 17 nt, Homo sapiens
ggagcugugcugauggg

SEQ ID NO: 2270 - RNA, 17 nt, Homo sapiens
cugugcugaugggcagg

SEQ ID NO: 2271 - RNA, 17 nt, Homo sapiens
gcugaugggcaggggag

SEQ ID NO: 2272 - RNA, 17 nt, Homo sapiens
aggggagagccagcucc

SEQ ID NO: 2273 - RNA, 17 nt, Homo sapiens
gagagccagcuccuccc

SEQ ID NO: 2274 - RNA, 17 nt, Homo sapiens
gagggagggucuugaug

SEQ ID NO: 2275 - RNA, 17 nt, Homo sapiens
gggucuugaugccuggg

SEQ ID NO: 2276 - RNA, 17 nt, Homo sapiens
gucuugaugccuggggu

SEQ ID NO: 2277 - RNA, 17 nt, Homo sapiens
ugccugggguuacccgc

SEQ ID NO: 2278 - RNA, 17 nt, Homo sapiens
cugggguuacccgcaga

SEQ ID NO: 2279 - RNA, 17 nt, Homo sapiens
gguuacccgcagaggcc

SEQ ID NO: 2280 - RNA, 17 nt, Homo sapiens
ccgcagaggccugggug

SEQ ID NO: 2281 - RNA, 17 nt, Homo sapiens
aggccugggugccggga

SEQ ID NO: 2282 - RNA, 17 nt, Homo sapiens
gccugggugccgggacg

SEQ ID NO: 2283 - RNA, 17 nt, Homo sapiens
gugccgggacgcucccc

SEQ ID NO: 2284 - RNA, 17 nt, Homo sapiens
gccgggacgcuccccgg

SEQ ID NO: 2285 - RNA, 17 nt, Homo sapiens
gcuccccgguuuggcug

SEQ ID NO: 2286 - RNA, 17 nt, Homo sapiens
ccgguuuggcugaaagg

SEQ ID NO: 2287 - RNA, 17 nt, Homo sapiens
aaaggaaagcagaugug

SEQ ID NO: 2288 - RNA, 17 nt, Homo sapiens
gaaagcagaugugguca

SEQ ID NO: 2289 - RNA, 17 nt, Homo sapiens
aagcagauguggucagc

SEQ ID NO: 2290 - RNA, 17 nt, Homo sapiens
cagauguggucagcuuc

SEQ ID NO: 2291 - RNA, 17 nt, Homo sapiens
uguggucagcuucucca

SEQ ID NO: 2292 - RNA, 17 nt, Homo sapiens
gcuucuccacugagccc

SEQ ID NO: 2293 - RNA, 17 nt, Homo sapiens
uccacugagcccaucug

SEQ ID NO: 2294 - RNA, 17 nt, Homo sapiens
cugagcccaucuggucu

SEQ ID NO: 2295 - RNA, 17 nt, Homo sapiens
cccaucuggucuucccg

SEQ ID NO: 2296 - RNA, 17 nt, Homo sapiens
uucccggggcugggccc

SEQ ID NO: 2297 - RNA, 17 nt, Homo sapiens
ggggcugggccccauag

SEQ ID NO: 2298 - RNA, 17 nt, Homo sapiens
ugggccccauagaucug

SEQ ID NO: 2299 - RNA, 17 nt, Homo sapiens
ccccauagaucuggguc

SEQ ID NO: 2300 - RNA, 17 nt, Homo sapiens
agaucugggucccugug

SEQ ID NO: 2301 - RNA, 17 nt, Homo sapiens
gggucccuguguggccc

SEQ ID NO: 2302 - RNA, 17 nt, Homo sapiens
gucccuguguggccccc

SEQ ID NO: 2303 - RNA, 17 nt, Homo sapiens
ccuguguggccccccug

SEQ ID NO: 2304 - RNA, 17 nt, Homo sapiens
ccccccuggucugaugc

SEQ ID NO: 2305 - RNA, 17 nt, Homo sapiens
cuggucugaugccgagg

SEQ ID NO: 2306 - RNA, 17 nt, Homo sapiens
ggucugaugccgaggau

SEQ ID NO: 2307 - RNA, 17 nt, Homo sapiens
ugccgaggauaccccug

SEQ ID NO: 2308 - RNA, 17 nt, Homo sapiens
ccgaggauaccccugca

SEQ ID NO: 2309 - RNA, 17 nt, Homo sapiens
auaccccugcaaacugc

SEQ ID NO: 2310 - RNA, 17 nt, Homo sapiens
cccugcaaacugccaau

SEQ ID NO: 2311 - RNA, 17 nt, Homo sapiens
ugcaaacugccaauccc

SEQ ID NO: 2312 - RNA, 17 nt, Homo sapiens
aacugccaaucccagag

SEQ ID NO: 2313 - RNA, 17 nt, Homo sapiens
cccagaggacaagacug

SEQ ID NO: 2314 - RNA, 17 nt, Homo sapiens
aggacaagacugggaag

SEQ ID NO: 2315 - RNA, 17 nt, Homo sapiens
acugggaagucccugca

SEQ ID NO: 2316 - RNA, 17 nt, Homo sapiens
aagucccugcagggaga

SEQ ID NO: 2317 - RNA, 17 nt, Homo sapiens
cagggagagcccauccc

SEQ ID NO: 2318 - RNA, 17 nt, Homo sapiens
gagagcccauccccgca

SEQ ID NO: 2319 - RNA, 17 nt, Homo sapiens
ccauccccgcacccuga

SEQ ID NO: 2320 - RNA, 17 nt, Homo sapiens
auccccgcacccugacc

SEQ ID NO: 2321 - RNA, 17 nt, Homo sapiens
gcacccugacccacaag

SEQ ID NO: 2322 - RNA, 17 nt, Homo sapiens
ccugacccacaagaggg

SEQ ID NO: 2323 - RNA, 17 nt, Homo sapiens
caagagggacuccugcu

SEQ ID NO: 2324 - RNA, 17 nt, Homo sapiens
ggacuccugcugcccac

SEQ ID NO: 2325 - RNA, 17 nt, Homo sapiens
cuccugcugcccaccag

SEQ ID NO: 2326 - RNA, 17 nt, Homo sapiens
ugcugcccaccaggcau

SEQ ID NO: 2327 - RNA, 17 nt, Homo sapiens
cccaccaggcaucccuc

SEQ ID NO: 2328 - RNA, 17 nt, Homo sapiens
caccaggcaucccucca

SEQ ID NO: 2329 - DNA, 31 bp, Artificial Sequence
  Description of Artificial Sequence:  Enzymatic Nucleic Acid
cgcggccgggctagctacaacgacgcctagg

SEQ ID NO: 2330 - DNA, 31 bp, Artificial Sequence
  Description of Artificial Sequence:  Enzymatic Nucleic Acid
cgccgcggggctagctacaacgacgccgcct

SEQ ID NO: 2331 - DNA, 31 bp, Artificial Sequence
  Description of Artificial Sequence:  Enzymatic Nucleic Acid
cgccgccgggctagctacaacgaggccgccg

SEQ ID NO: 2332 - DNA, 31 bp, Artificial Sequence
  Description of Artificial Sequence:  Enzymatic Nucleic Acid
ctccgccgggctagctacaacgacgcggccg

SEQ ID NO: 2333 - DNA, 31 bp, Artificial Sequence
  Description of Artificial Sequence:  Enzymatic Nucleic Acid
tgcctccgggctagctacaacgacgccgcgg

SEQ ID NO: 2334 - DNA, 31 bp, Artificial Sequence
  Description of Artificial Sequence:  Enzymatic Nucleic Acid
cgctgctgggctagctacaacgactccgccg

SEQ ID NO: 2335 - DNA, 31 bp, Artificial Sequence
  Description of Artificial Sequence:  Enzymatic Nucleic Acid
cgccgctgggctagctacaacgatgcctccg

SEQ ID NO: 2336 - DNA, 31 bp, Artificial Sequence
  Description of Artificial Sequence:  Enzymatic Nucleic Acid
cgccgccgggctagctacaacgatgctgcct

SEQ ID NO: 2337 - DNA, 31 bp, Artificial Sequence
  Description of Artificial Sequence:  Enzymatic Nucleic Acid
tgccgccgggctagctacaacgacgctgctg

SEQ ID NO: 2338 - DNA, 31 bp, Artificial Sequence
  Description of Artificial Sequence:  Enzymatic Nucleic Acid
cactgccgggctagctacaacgacgccgctg

SEQ ID NO: 2339 - DNA, 31 bp, Artificial Sequence
  Description of Artificial Sequence:  Enzymatic Nucleic Acid
cgccactgggctagctacaacgacgccgccg

SEQ ID NO: 2340 - DNA, 31 bp, Artificial Sequence
  Description of Artificial Sequence:  Enzymatic Nucleic Acid
cgccgccaggctagctacaacgatgccgccg

SEQ ID NO: 2341 - DNA, 31 bp, Artificial Sequence
  Description of Artificial Sequence:  Enzymatic Nucleic Acid
cgccgccgggctagctacaacgacactgccg

SEQ ID NO: 2342 - DNA, 31 bp, Artificial Sequence
  Description of Artificial Sequence:  Enzymatic Nucleic Acid
cttcgccgggctagctacaacgacgccactg

SEQ ID NO: 2343 - DNA, 31 bp, Artificial Sequence
  Description of Artificial Sequence:  Enzymatic Nucleic Acid
caccttcgggctagctacaacgacgccgcca

SEQ ID NO: 2344 - DNA, 31 bp, Artificial Sequence
  Description of Artificial Sequence:  Enzymatic Nucleic Acid
cgccgccaggctagctacaacgacttcgccg

SEQ ID NO: 2345 - DNA, 31 bp, Artificial Sequence
  Description of Artificial Sequence:  Enzymatic Nucleic Acid
agccgccgggctagctacaacgacaccttcg

SEQ ID NO: 2346 - DNA, 31 bp, Artificial Sequence
  Description of Artificial Sequence:  Enzymatic Nucleic Acid
ccgagccgggctagctacaacgacgccacct

SEQ ID NO: 2347 - DNA, 31 bp, Artificial Sequence
  Description of Artificial Sequence:  Enzymatic Nucleic Acid
tggccgagggctagctacaacgacgccgcca

SEQ ID NO: 2348 - DNA, 31 bp, Artificial Sequence
  Description of Artificial Sequence:  Enzymatic Nucleic Acid
agtactggggctagctacaacgacgagccgc

SEQ ID NO: 2349 - DNA, 31 bp, Artificial Sequence
  Description of Artificial Sequence:  Enzymatic Nucleic Acid
cgggagtaggctagctacaacgatggccgag

SEQ ID NO: 2350 - DNA, 31 bp, Artificial Sequence
  Description of Artificial Sequence:  Enzymatic Nucleic Acid
gccgggagggctagctacaacgaactggccg

SEQ ID NO: 2351 - DNA, 31 bp, Artificial Sequence
  Description of Artificial Sequence:  Enzymatic Nucleic Acid
ggcgggggggctagctacaacgacgggagta

SEQ ID NO: 2352 - DNA, 31 bp, Artificial Sequence
  Description of Artificial Sequence:  Enzymatic Nucleic Acid
cgaaatggggctagctacaacgagggggccg

SEQ ID NO: 2353 - DNA, 31 bp, Artificial Sequence
  Description of Artificial Sequence:  Enzymatic Nucleic Acid
gtccgaaaggctagctacaacgaggcggggg

SEQ ID NO: 2354 - DNA, 31 bp, Artificial Sequence
  Description of Artificial Sequence:  Enzymatic Nucleic Acid
gctcccagggctagctacaacgaccgaaatg

SEQ ID NO: 2355 - DNA, 31 bp, Artificial Sequence
  Description of Artificial Sequence:  Enzymatic Nucleic Acid
cgcgctcgggctagctacaacgatcccagtc

SEQ ID NO: 2356 - DNA, 31 bp, Artificial Sequence
  Description of Artificial Sequence:  Enzymatic Nucleic Acid
gcgccgcgggctagctacaacgatcgctccc

SEQ ID NO: 2357 - DNA, 31 bp, Artificial Sequence
  Description of Artificial Sequence:  Enzymatic Nucleic Acid
ctgcgccgggctagctacaacgagctcgctc

SEQ ID NO: 2358 - DNA, 31 bp, Artificial Sequence
  Description of Artificial Sequence:  Enzymatic Nucleic Acid
tgcctgcgggctagctacaacgacgcgctcg

SEQ ID NO: 2359 - DNA, 31 bp, Artificial Sequence
  Description of Artificial Sequence:  Enzymatic Nucleic Acid
agtgcctgggctagctacaacgagccgcgct

SEQ ID NO: 2360 - DNA, 31 bp, Artificial Sequence
  Description of Artificial Sequence:  Enzymatic Nucleic Acid
cttcagtgggctagctacaacgactgcgccg

SEQ ID NO: 2361 - DNA, 31 bp, Artificial Sequence
  Description of Artificial Sequence:  Enzymatic Nucleic Acid
gccttcagggctagctacaacgagcctgcgc

SEQ ID NO: 2362 - DNA, 31 bp, Artificial Sequence
  Description of Artificial Sequence:  Enzymatic Nucleic Acid
cgccgccgggctagctacaacgacttcagtg

SEQ ID NO: 2363 - DNA, 31 bp, Artificial Sequence
  Description of Artificial Sequence:  Enzymatic Nucleic Acid
ccccgccgggctagctacaacgacgccttca

SEQ ID NO: 2364 - DNA, 31 bp, Artificial Sequence
  Description of Artificial Sequence:  Enzymatic Nucleic Acid
tggccccgggctagctacaacgacgccgcct

SEQ ID NO: 2365 - DNA, 31 bp, Artificial Sequence
  Description of Artificial Sequence:  Enzymatic Nucleic Acid
gcctctggggctagctacaacgacccgccgc

SEQ ID NO: 2366 - DNA, 31 bp, Artificial Sequence
  Description of Artificial Sequence:  Enzymatic Nucleic Acid
ccgctgagggctagctacaacgactctggcc

SEQ ID NO: 2367 - DNA, 31 bp, Artificial Sequence
  Description of Artificial Sequence:  Enzymatic Nucleic Acid
gggagccgggctagctacaacgatgagcctc

SEQ ID NO: 2368 - DNA, 31 bp, Artificial Sequence
  Description of Artificial Sequence:  Enzymatic Nucleic Acid
cctgggagggctagctacaacgacgctgagc

SEQ ID NO: 2369 - DNA, 31 bp, Artificial Sequence
  Description of Artificial Sequence:  Enzymatic Nucleic Acid
ctcccgcaggctagctacaacgactgggagc

SEQ ID NO: 2370 - DNA, 31 bp, Artificial Sequence
  Description of Artificial Sequence:  Enzymatic Nucleic Acid
ctctcccgggctagctacaacgaacctggga

SEQ ID NO: 2371 - DNA, 31 bp, Artificial Sequence
  Description of Artificial Sequence:  Enzymatic Nucleic Acid
tcagcaggggctagctacaacgactctctcc

SEQ ID NO: 2372 - DNA, 31 bp, Artificial Sequence
  Description of Artificial Sequence:  Enzymatic Nucleic Acid
attttcagggctagctacaacgaaggcctct

SEQ ID NO: 2373 - DNA, 31 bp, Artificial Sequence
  Description of Artificial Sequence:  Enzymatic Nucleic Acid
ttcagtcaggctagctacaacgatttcagca

SEQ ID NO: 2374 - DNA, 31 bp, Artificial Sequence
  Description of Artificial Sequence:  Enzymatic Nucleic Acid
atattcagggctagctacaacgacattttca

SEQ ID NO: 2375 - DNA, 31 bp, Artificial Sequence
  Description of Artificial Sequence:  Enzymatic Nucleic Acid
agtttataggctagctacaacgatcagtcat

SEQ ID NO: 2376 - DNA, 31 bp, Artificial Sequence
  Description of Artificial Sequence:  Enzymatic Nucleic Acid
caagtttaggctagctacaacgaattcagtc

SEQ ID NO: 2377 - DNA, 31 bp, Artificial Sequence
  Description of Artificial Sequence:  Enzymatic Nucleic Acid
accacaagggctagctacaacgattatattc

SEQ ID NO: 2378 - DNA, 31 bp, Artificial Sequence
  Description of Artificial Sequence:  Enzymatic Nucleic Acid
aactaccaggctagctacaacgaaagtttat

SEQ ID NO: 2379 - DNA, 31 bp, Artificial Sequence
  Description of Artificial Sequence:  Enzymatic Nucleic Acid
tccaactaggctagctacaacgacacaagtt

SEQ ID NO: 2380 - DNA, 31 bp, Artificial Sequence
  Description of Artificial Sequence:  Enzymatic Nucleic Acid
agctccaaggctagctacaacgataccacaa

SEQ ID NO: 2381 - DNA, 31 bp, Artificial Sequence
  Description of Artificial Sequence:  Enzymatic Nucleic Acid
gccacaagggctagctacaacgatccaacta

SEQ ID NO: 2382 - DNA, 31 bp, Artificial Sequence
  Description of Artificial Sequence:  Enzymatic Nucleic Acid
ctacgccaggctagctacaacgaaagctcca

SEQ ID NO: 2383 - DNA, 31 bp, Artificial Sequence
  Description of Artificial Sequence:  Enzymatic Nucleic Acid
tgcctacgggctagctacaacgacacaagct

SEQ ID NO: 2384 - DNA, 31 bp, Artificial Sequence
  Description of Artificial Sequence:  Enzymatic Nucleic Acid
cttgcctaggctagctacaacgagccacaag

SEQ ID NO: 2385 - DNA, 31 bp, Artificial Sequence
  Description of Artificial Sequence:  Enzymatic Nucleic Acid
cactcttgggctagctacaacgactacgcca

SEQ ID NO: 2386 - DNA, 31 bp, Artificial Sequence
  Description of Artificial Sequence:  Enzymatic Nucleic Acid
tcaaggcaggctagctacaacgatcttgcct

SEQ ID NO: 2387 - DNA, 31 bp, Artificial Sequence
  Description of Artificial Sequence:  Enzymatic Nucleic Acid
cgtcaaggggctagctacaacgaactcttgc

SEQ ID NO: 2388 - DNA, 31 bp, Artificial Sequence
  Description of Artificial Sequence:  Enzymatic Nucleic Acid
ctgtatcgggctagctacaacgacaaggcac

SEQ ID NO: 2389 - DNA, 31 bp, Artificial Sequence
  Description of Artificial Sequence:  Enzymatic Nucleic Acid
tagctgtaggctagctacaacgacgtcaagg

SEQ ID NO: 2390 - DNA, 31 bp, Artificial Sequence
  Description of Artificial Sequence:  Enzymatic Nucleic Acid
attagctgggctagctacaacgaatcgtcaa

SEQ ID NO: 2391 - DNA, 31 bp, Artificial Sequence
  Description of Artificial Sequence:  Enzymatic Nucleic Acid
tgaattagggctagctacaacgatgtatcgt

SEQ ID NO: 2392 - DNA, 31 bp, Artificial Sequence
  Description of Artificial Sequence:  Enzymatic Nucleic Acid
attctgaaggctagctacaacgatagctgta

SEQ ID NO: 2393 - DNA, 31 bp, Artificial Sequence
  Description of Artificial Sequence:  Enzymatic Nucleic Acid
caaaatgaggctagctacaacgatctgaatt

SEQ ID NO: 2394 - DNA, 31 bp, Artificial Sequence
  Description of Artificial Sequence:  Enzymatic Nucleic Acid
ccacaaaaggctagctacaacgagattctga

SEQ ID NO: 2395 - DNA, 31 bp, Artificial Sequence
  Description of Artificial Sequence:  Enzymatic Nucleic Acid
ttcgtccaggctagctacaacgaaaaatgat

SEQ ID NO: 2396 - DNA, 31 bp, Artificial Sequence
  Description of Artificial Sequence:  Enzymatic Nucleic Acid
catattcgggctagctacaacgaccacaaaa

SEQ ID NO: 2397 - DNA, 31 bp, Artificial Sequence
  Description of Artificial Sequence:  Enzymatic Nucleic Acid
ggatcataggctagctacaacgatcgtccac

SEQ ID NO: 2398 - DNA, 31 bp, Artificial Sequence
  Description of Artificial Sequence:  Enzymatic Nucleic Acid
ttggatcaggctagctacaacgaattcgtcc

SEQ ID NO: 2399 - DNA, 31 bp, Artificial Sequence
  Description of Artificial Sequence:  Enzymatic Nucleic Acid
ttgttggaggctagctacaacgacatattcg

SEQ ID NO: 2400 - DNA, 31 bp, Artificial Sequence
  Description of Artificial Sequence:  Enzymatic Nucleic Acid
ctctattgggctagctacaacgatggatcat

SEQ ID NO: 2401 - DNA, 31 bp, Artificial Sequence
  Description of Artificial Sequence:  Enzymatic Nucleic Acid
atcctctaggctagctacaacgatgttggat

SEQ ID NO: 2402 - DNA, 31 bp, Artificial Sequence
  Description of Artificial Sequence:  Enzymatic Nucleic Acid
tgtaggaaggctagctacaacgacctctatt

SEQ ID NO: 2403 - DNA, 31 bp, Artificial Sequence
  Description of Artificial Sequence:  Enzymatic Nucleic Acid
gcttcctgggctagctacaacgaaggaatcc

SEQ ID NO: 2404 - DNA, 31 bp, Artificial Sequence
  Description of Artificial Sequence:  Enzymatic Nucleic Acid
actacttgggctagctacaacgattcctgta

SEQ ID NO: 2405 - DNA, 31 bp, Artificial Sequence
  Description of Artificial Sequence:  Enzymatic Nucleic Acid
aattactaggctagctacaacgattgcttcc

SEQ ID NO: 2406 - DNA, 31 bp, Artificial Sequence
  Description of Artificial Sequence:  Enzymatic Nucleic Acid
atcaattaggctagctacaacgatacttgct

SEQ ID NO: 2407 - DNA, 31 bp, Artificial Sequence
  Description of Artificial Sequence:  Enzymatic Nucleic Acid
tccatcaaggctagctacaacgatactactt

SEQ ID NO: 2408 - DNA, 31 bp, Artificial Sequence
  Description of Artificial Sequence:  Enzymatic Nucleic Acid
tttctccaggctagctacaacgacaattact

SEQ ID NO: 2409 - DNA, 31 bp, Artificial Sequence
  Description of Artificial Sequence:  Enzymatic Nucleic Acid
gagacaggggctagctacaacgattctccat

SEQ ID NO: 2410 - DNA, 31 bp, Artificial Sequence
  Description of Artificial Sequence:  Enzymatic Nucleic Acid
ccaagagaggctagctacaacgaaggtttct

SEQ ID NO: 2411 - DNA, 31 bp, Artificial Sequence
  Description of Artificial Sequence:  Enzymatic Nucleic Acid
cgagaataggctagctacaacgaccaagaga

SEQ ID NO: 2412 - DNA, 31 bp, Artificial Sequence
  Description of Artificial Sequence:  Enzymatic Nucleic Acid
gtcgagaaggctagctacaacgaatccaaga

SEQ ID NO: 2413 - DNA, 31 bp, Artificial Sequence
  Description of Artificial Sequence:  Enzymatic Nucleic Acid
ctgctgtgggctagctacaacgacgagaata

SEQ ID NO: 2414 - DNA, 31 bp, Artificial Sequence
  Description of Artificial Sequence:  Enzymatic Nucleic Acid
acctgctgggctagctacaacgagtcgagaa

SEQ ID NO: 2415 - DNA, 31 bp, Artificial Sequence
  Description of Artificial Sequence:  Enzymatic Nucleic Acid
ttgacctgggctagctacaacgatgtgtcga

SEQ ID NO: 2416 - DNA, 31 bp, Artificial Sequence
  Description of Artificial Sequence:  Enzymatic Nucleic Acid
cctcttgaggctagctacaacgactgctgtg

SEQ ID NO: 2417 - DNA, 31 bp, Artificial Sequence
  Description of Artificial Sequence:  Enzymatic Nucleic Acid
gcactgtaggctagctacaacgatcctcttg

SEQ ID NO: 2418 - DNA, 31 bp, Artificial Sequence
  Description of Artificial Sequence:  Enzymatic Nucleic Acid
ttgcactgggctagctacaacgaactcctct

SEQ ID NO: 2419 - DNA, 31 bp, Artificial Sequence
  Description of Artificial Sequence:  Enzymatic Nucleic Acid
tcattgcaggctagctacaacgatgtactcc

SEQ ID NO: 2420 - DNA, 31 bp, Artificial Sequence
  Description of Artificial Sequence:  Enzymatic Nucleic Acid
cctcattgggctagctacaacgaactgtact

SEQ ID NO: 2421 - DNA, 31 bp, Artificial Sequence
  Description of Artificial Sequence:  Enzymatic Nucleic Acid
gtccctcaggctagctacaacgatgcactgt

SEQ ID NO: 2422 - DNA, 31 bp, Artificial Sequence
  Description of Artificial Sequence:  Enzymatic Nucleic Acid
tgtactggggctagctacaacgaccctcatt

SEQ ID NO: 2423 - DNA, 31 bp, Artificial Sequence
  Description of Artificial Sequence:  Enzymatic Nucleic Acid
ctcatgtaggctagctacaacgatggtccct

SEQ ID NO: 2424 - DNA, 31 bp, Artificial Sequence
  Description of Artificial Sequence:  Enzymatic Nucleic Acid
tcctcatgggctagctacaacgaactggtcc

SEQ ID NO: 2425 - DNA, 31 bp, Artificial Sequence
  Description of Artificial Sequence:  Enzymatic Nucleic Acid
agtcctcaggctagctacaacgagtactggt

SEQ ID NO: 2426 - DNA, 31 bp, Artificial Sequence
  Description of Artificial Sequence:  Enzymatic Nucleic Acid
ctccccagggctagctacaacgacctcatgt

SEQ ID NO: 2427 - DNA, 31 bp, Artificial Sequence
  Description of Artificial Sequence:  Enzymatic Nucleic Acid
aaagaaagggctagctacaacgacctcccca

SEQ ID NO: 2428 - DNA, 31 bp, Artificial Sequence
  Description of Artificial Sequence:  Enzymatic Nucleic Acid
caaatacaggctagctacaacgaaaagaaag

SEQ ID NO: 2429 - DNA, 31 bp, Artificial Sequence
  Description of Artificial Sequence:  Enzymatic Nucleic Acid
ggcaaataggctagctacaacgaacaaagaa

SEQ ID NO: 2430 - DNA, 31 bp, Artificial Sequence
  Description of Artificial Sequence:  Enzymatic Nucleic Acid
atggcaaaggctagctacaacgaacacaaag

SEQ ID NO: 2431 - DNA, 31 bp, Artificial Sequence
  Description of Artificial Sequence:  Enzymatic Nucleic Acid
atttatggggctagctacaacgaaaatacac

SEQ ID NO: 2432 - DNA, 31 bp, Artificial Sequence
  Description of Artificial Sequence:  Enzymatic Nucleic Acid
attatttaggctagctacaacgaggcaaata

SEQ ID NO: 2433 - DNA, 31 bp, Artificial Sequence
  Description of Artificial Sequence:  Enzymatic Nucleic Acid
tagtattaggctagctacaacgattatggca

SEQ ID NO: 2434 - DNA, 31 bp, Artificial Sequence
  Description of Artificial Sequence:  Enzymatic Nucleic Acid
atttagtaggctagctacaacgatatttatg

SEQ ID NO: 2435 - DNA, 31 bp, Artificial Sequence
  Description of Artificial Sequence:  Enzymatic Nucleic Acid
tgatttagggctagctacaacgaattattta

SEQ ID NO: 2436 - DNA, 31 bp, Artificial Sequence
  Description of Artificial Sequence:  Enzymatic Nucleic Acid
tcaaatgaggctagctacaacgattagtatt

SEQ ID NO: 2437 - DNA, 31 bp, Artificial Sequence
  Description of Artificial Sequence:  Enzymatic Nucleic Acid
tcttcaaaggctagctacaacgagatttagt

SEQ ID NO: 2438 - DNA, 31 bp, Artificial Sequence
  Description of Artificial Sequence:  Enzymatic Nucleic Acid
ggtgaataggctagctacaacgacttcaaat

SEQ ID NO: 2439 - DNA, 31 bp, Artificial Sequence
  Description of Artificial Sequence:  Enzymatic Nucleic Acid
atggtgaaggctagctacaacgaatcttcaa

SEQ ID NO: 2440 - DNA, 31 bp, Artificial Sequence
  Description of Artificial Sequence:  Enzymatic Nucleic Acid
tataatggggctagctacaacgagaatatct

SEQ ID NO: 2441 - DNA, 31 bp, Artificial Sequence
  Description of Artificial Sequence:  Enzymatic Nucleic Acid
ctctataaggctagctacaacgaggtgaata

SEQ ID NO: 2442 - DNA, 31 bp, Artificial Sequence
  Description of Artificial Sequence:  Enzymatic Nucleic Acid
gttctctaggctagctacaacgaaatggtga

SEQ ID NO: 2443 - DNA, 31 bp, Artificial Sequence
  Description of Artificial Sequence:  Enzymatic Nucleic Acid
ttaatttgggctagctacaacgatctctata

SEQ ID NO: 2444 - DNA, 31 bp, Artificial Sequence
  Description of Artificial Sequence:  Enzymatic Nucleic Acid
tcttttaaggctagctacaacgattgttctc

SEQ ID NO: 2445 - DNA, 31 bp, Artificial Sequence
  Description of Artificial Sequence:  Enzymatic Nucleic Acid
gtccttaaggctagctacaacgatcttttaa

SEQ ID NO: 2446 - DNA, 31 bp, Artificial Sequence
  Description of Artificial Sequence:  Enzymatic Nucleic Acid
cttcagagggctagctacaacgaccttaact

SEQ ID NO: 2447 - DNA, 31 bp, Artificial Sequence
  Description of Artificial Sequence:  Enzymatic Nucleic Acid
taggtacaggctagctacaacgacttcagag

SEQ ID NO: 2448 - DNA, 31 bp, Artificial Sequence
  Description of Artificial Sequence:  Enzymatic Nucleic Acid
cataggtaggctagctacaacgaatcttcag

SEQ ID NO: 2449 - DNA, 31 bp, Artificial Sequence
  Description of Artificial Sequence:  Enzymatic Nucleic Acid
accataggggctagctacaacgaacatcttc

SEQ ID NO: 2450 - DNA, 31 bp, Artificial Sequence
  Description of Artificial Sequence:  Enzymatic Nucleic Acid
taggaccaggctagctacaacgaaggtacat

SEQ ID NO: 2451 - DNA, 31 bp, Artificial Sequence
  Description of Artificial Sequence:  Enzymatic Nucleic Acid
tactaggaggctagctacaacgacataggta

SEQ ID NO: 2452 - DNA, 31 bp, Artificial Sequence
  Description of Artificial Sequence:  Enzymatic Nucleic Acid
atttcctaggctagctacaacgataggacca

SEQ ID NO: 2453 - DNA, 31 bp, Artificial Sequence
  Description of Artificial Sequence:  Enzymatic Nucleic Acid
cacatttaggctagctacaacgattcctact

SEQ ID NO: 2454 - DNA, 31 bp, Artificial Sequence
  Description of Artificial Sequence:  Enzymatic Nucleic Acid
aaatcacaggctagctacaacgattatttcc

SEQ ID NO: 2455 - DNA, 31 bp, Artificial Sequence
  Description of Artificial Sequence:  Enzymatic Nucleic Acid
gcaaatcaggctagctacaacgaatttattt

SEQ ID NO: 2456 - DNA, 31 bp, Artificial Sequence
  Description of Artificial Sequence:  Enzymatic Nucleic Acid
aaggcaaaggctagctacaacgacacattta

SEQ ID NO: 2457 - DNA, 31 bp, Artificial Sequence
  Description of Artificial Sequence:  Enzymatic Nucleic Acid
ctagaaggggctagctacaacgaaaatcaca

SEQ ID NO: 2458 - DNA, 31 bp, Artificial Sequence
  Description of Artificial Sequence:  Enzymatic Nucleic Acid
gtctactgggctagctacaacgatctagaag

SEQ ID NO: 2459 - DNA, 31 bp, Artificial Sequence
  Description of Artificial Sequence:  Enzymatic Nucleic Acid
tgtgtctaggctagctacaacgatgttctag

SEQ ID NO: 2460 - DNA, 31 bp, Artificial Sequence
  Description of Artificial Sequence:  Enzymatic Nucleic Acid
gttttgtgggctagctacaacgactactgtt

SEQ ID NO: 2461 - DNA, 31 bp, Artificial Sequence
  Description of Artificial Sequence:  Enzymatic Nucleic Acid
ctgttttgggctagctacaacgagtctactg

SEQ ID NO: 2462 - DNA, 31 bp, Artificial Sequence
  Description of Artificial Sequence:  Enzymatic Nucleic Acid
tgagcctgggctagctacaacgatttgtgtc

SEQ ID NO: 2463 - DNA, 31 bp, Artificial Sequence
  Description of Artificial Sequence:  Enzymatic Nucleic Acid
gtcctgagggctagctacaacgactgttttg

SEQ ID NO: 2464 - DNA, 31 bp, Artificial Sequence
  Description of Artificial Sequence:  Enzymatic Nucleic Acid
ttgctaagggctagctacaacgacctgagcc

SEQ ID NO: 2465 - DNA, 31 bp, Artificial Sequence
  Description of Artificial Sequence:  Enzymatic Nucleic Acid
acttcttgggctagctacaacgataagtcct

SEQ ID NO: 2466 - DNA, 31 bp, Artificial Sequence
  Description of Artificial Sequence:  Enzymatic Nucleic Acid
ttccataaggctagctacaacgattcttgct

SEQ ID NO: 2467 - DNA, 31 bp, Artificial Sequence
  Description of Artificial Sequence:  Enzymatic Nucleic Acid
gaattccaggctagctacaacgaaacttctt

SEQ ID NO: 2468 - DNA, 31 bp, Artificial Sequence
  Description of Artificial Sequence:  Enzymatic Nucleic Acid
aaaaggaaggctagctacaacgatccataac

SEQ ID NO: 2469 - DNA, 31 bp, Artificial Sequence
  Description of Artificial Sequence:  Enzymatic Nucleic Acid
tgtttcaaggctagctacaacgaaaaaggaa

SEQ ID NO: 2470 - DNA, 31 bp, Artificial Sequence
  Description of Artificial Sequence:  Enzymatic Nucleic Acid
tgctgatgggctagctacaacgattcaataa

SEQ ID NO: 2471 - DNA, 31 bp, Artificial Sequence
  Description of Artificial Sequence:  Enzymatic Nucleic Acid
tttgctgaggctagctacaacgagtttcaat

SEQ ID NO: 2472 - DNA, 31 bp, Artificial Sequence
  Description of Artificial Sequence:  Enzymatic Nucleic Acid
tgtctttgggctagctacaacgatgatgttt

SEQ ID NO: 2473 - DNA, 31 bp, Artificial Sequence
  Description of Artificial Sequence:  Enzymatic Nucleic Acid
ctgtcttgggctagctacaacgactttgctg

SEQ ID NO: 2474 - DNA, 31 bp, Artificial Sequence
  Description of Artificial Sequence:  Enzymatic Nucleic Acid
acaccctgggctagctacaacgacttgtctt

SEQ ID NO: 2475 - DNA, 31 bp, Artificial Sequence
  Description of Artificial Sequence:  Enzymatic Nucleic Acid
catcaacaggctagctacaacgacctgtctt

SEQ ID NO: 2476 - DNA, 31 bp, Artificial Sequence
  Description of Artificial Sequence:  Enzymatic Nucleic Acid
atcatcaaggctagctacaacgaaccctgtc

SEQ ID NO: 2477 - DNA, 31 bp, Artificial Sequence
  Description of Artificial Sequence:  Enzymatic Nucleic Acid
aggcatcaggctagctacaacgacaacaccc

SEQ ID NO: 2478 - DNA, 31 bp, Artificial Sequence
  Description of Artificial Sequence:  Enzymatic Nucleic Acid
agaaggcaggctagctacaacgacatcaaca

SEQ ID NO: 2479 - DNA, 31 bp, Artificial Sequence
  Description of Artificial Sequence:  Enzymatic Nucleic Acid
atagaaggggctagctacaacgaatcatcaa

SEQ ID NO: 2480 - DNA, 31 bp, Artificial Sequence
  Description of Artificial Sequence:  Enzymatic Nucleic Acid
ctaatgtaggctagctacaacgaagaaggca

SEQ ID NO: 2481 - DNA, 31 bp, Artificial Sequence
  Description of Artificial Sequence:  Enzymatic Nucleic Acid
aactaatgggctagctacaacgaatagaagg

SEQ ID NO: 2482 - DNA, 31 bp, Artificial Sequence
  Description of Artificial Sequence:  Enzymatic Nucleic Acid
cgaactaaggctagctacaacgagtatagaa

SEQ ID NO: 2483 - DNA, 31 bp, Artificial Sequence
  Description of Artificial Sequence:  Enzymatic Nucleic Acid
ttctcgaaggctagctacaacgataatgtat

SEQ ID NO: 2484 - DNA, 31 bp, Artificial Sequence
  Description of Artificial Sequence:  Enzymatic Nucleic Acid
ttttcgaaggctagctacaacgattctcgaa

SEQ ID NO: 2485 - DNA, 31 bp, Artificial Sequence
  Description of Artificial Sequence:  Enzymatic Nucleic Acid
tctttatgggctagctacaacgatttcgaat

SEQ ID NO: 2486 - DNA, 31 bp, Artificial Sequence
  Description of Artificial Sequence:  Enzymatic Nucleic Acid
tttctttaggctagctacaacgagttttcga

SEQ ID NO: 2487 - DNA, 31 bp, Artificial Sequence
  Description of Artificial Sequence:  Enzymatic Nucleic Acid
tttgctcaggctagctacaacgacttttctt

SEQ ID NO: 2488 - DNA, 31 bp, Artificial Sequence
  Description of Artificial Sequence:  Enzymatic Nucleic Acid
catctttgggctagctacaacgatcatcttt

SEQ ID NO: 2489 - DNA, 31 bp, Artificial Sequence
  Description of Artificial Sequence:  Enzymatic Nucleic Acid
ttttaccaggctagctacaacgactttgctc

SEQ ID NO: 2490 - DNA, 31 bp, Artificial Sequence
  Description of Artificial Sequence:  Enzymatic Nucleic Acid
tctttttaggctagctacaacgacatctttg

SEQ ID NO: 2491 - DNA, 31 bp, Artificial Sequence
  Description of Artificial Sequence:  Enzymatic Nucleic Acid
gtctttgaggctagctacaacgattcttttt

SEQ ID NO: 2492 - DNA, 31 bp, Artificial Sequence
  Description of Artificial Sequence:  Enzymatic Nucleic Acid
acactttgggctagctacaacgactttgact

SEQ ID NO: 2493 - DNA, 31 bp, Artificial Sequence
  Description of Artificial Sequence:  Enzymatic Nucleic Acid
attacacaggctagctacaacgatttgtctt

SEQ ID NO: 2494 - DNA, 31 bp, Artificial Sequence
  Description of Artificial Sequence:  Enzymatic Nucleic Acid
taattacaggctagctacaacgaactttgtc

SEQ ID NO: 2495 - DNA, 31 bp, Artificial Sequence
  Description of Artificial Sequence:  Enzymatic Nucleic Acid
cataattaggctagctacaacgaacactttg

SEQ ID NO: 2496 - DNA, 31 bp, Artificial Sequence
  Description of Artificial Sequence:  Enzymatic Nucleic Acid
ttacataaggctagctacaacgatacacact

SEQ ID NO: 2497 - DNA, 31 bp, Artificial Sequence
  Description of Artificial Sequence:  Enzymatic Nucleic Acid
tatttacaggctagctacaacgaaattacac

SEQ ID NO: 2498 - DNA, 31 bp, Artificial Sequence
  Description of Artificial Sequence:  Enzymatic Nucleic Acid
tgtatttaggctagctacaacgaataattac

SEQ ID NO: 2499 - DNA, 31 bp, Artificial Sequence
  Description of Artificial Sequence:  Enzymatic Nucleic Acid
aaattgtaggctagctacaacgattacataa

SEQ ID NO: 2500 - DNA, 31 bp, Artificial Sequence
  Description of Artificial Sequence:  Enzymatic Nucleic Acid
acaaattgggctagctacaacgaatttacat

SEQ ID NO: 2501 - DNA, 31 bp, Artificial Sequence
  Description of Artificial Sequence:  Enzymatic Nucleic Acid
agtacaaaggctagctacaacgatgtattta

SEQ ID NO: 2502 - DNA, 31 bp, Artificial Sequence
  Description of Artificial Sequence:  Enzymatic Nucleic Acid
aaaaagtaggctagctacaacgaaaattgta

SEQ ID NO: 2503 - DNA, 31 bp, Artificial Sequence
  Description of Artificial Sequence:  Enzymatic Nucleic Acid
gaaaaaagggctagctacaacgaacaaattg

SEQ ID NO: 2504 - DNA, 31 bp, Artificial Sequence
  Description of Artificial Sequence:  Enzymatic Nucleic Acid
ctagtatgggctagctacaacgacttaagaa

SEQ ID NO: 2505 - DNA, 31 bp, Artificial Sequence
  Description of Artificial Sequence:  Enzymatic Nucleic Acid
tactagtaggctagctacaacgagccttaag

SEQ ID NO: 2506 - DNA, 31 bp, Artificial Sequence
  Description of Artificial Sequence:  Enzymatic Nucleic Acid
tgtactagggctagctacaacgaatgcctta

SEQ ID NO: 2507 - DNA, 31 bp, Artificial Sequence
  Description of Artificial Sequence:  Enzymatic Nucleic Acid
cacttgtaggctagctacaacgatagtatgc

SEQ ID NO: 2508 - DNA, 31 bp, Artificial Sequence
  Description of Artificial Sequence:  Enzymatic Nucleic Acid
accacttgggctagctacaacgaactagtat

SEQ ID NO: 2509 - DNA, 31 bp, Artificial Sequence
  Description of Artificial Sequence:  Enzymatic Nucleic Acid
aattaccaggctagctacaacgattgtacta

SEQ ID NO: 2510 - DNA, 31 bp, Artificial Sequence
  Description of Artificial Sequence:  Enzymatic Nucleic Acid
aaaaattaggctagctacaacgacacttgta

SEQ ID NO: 2511 - DNA, 31 bp, Artificial Sequence
  Description of Artificial Sequence:  Enzymatic Nucleic Acid
tacaaaaaggctagctacaacgataccactt

SEQ ID NO: 2512 - DNA, 31 bp, Artificial Sequence
  Description of Artificial Sequence:  Enzymatic Nucleic Acid
gtaatgtaggctagctacaacgaaaaaatta

SEQ ID NO: 2513 - DNA, 31 bp, Artificial Sequence
  Description of Artificial Sequence:  Enzymatic Nucleic Acid
gtgtaatgggctagctacaacgaacaaaaat

SEQ ID NO: 2514 - DNA, 31 bp, Artificial Sequence
  Description of Artificial Sequence:  Enzymatic Nucleic Acid
tagtgtaaggctagctacaacgagtacaaaa

SEQ ID NO: 2515 - DNA, 31 bp, Artificial Sequence
  Description of Artificial Sequence:  Enzymatic Nucleic Acid
atttagtgggctagctacaacgaaatgtaca

SEQ ID NO: 2516 - DNA, 31 bp, Artificial Sequence
  Description of Artificial Sequence:  Enzymatic Nucleic Acid
taatttagggctagctacaacgagtaatgta

SEQ ID NO: 2517 - DNA, 31 bp, Artificial Sequence
  Description of Artificial Sequence:  Enzymatic Nucleic Acid
gctaataaggctagctacaacgattagtgta

SEQ ID NO: 2518 - DNA, 31 bp, Artificial Sequence
  Description of Artificial Sequence:  Enzymatic Nucleic Acid
aatgctaaggctagctacaacgaaatttagt

SEQ ID NO: 2519 - DNA, 31 bp, Artificial Sequence
  Description of Artificial Sequence:  Enzymatic Nucleic Acid
aacaaatgggctagctacaacgataataatt

SEQ ID NO: 2520 - DNA, 31 bp, Artificial Sequence
  Description of Artificial Sequence:  Enzymatic Nucleic Acid
aaaacaaaggctagctacaacgagctaataa

SEQ ID NO: 2521 - DNA, 31 bp, Artificial Sequence
  Description of Artificial Sequence:  Enzymatic Nucleic Acid
tgctaaaaggctagctacaacgaaaatgcta

SEQ ID NO: 2522 - DNA, 31 bp, Artificial Sequence
  Description of Artificial Sequence:  Enzymatic Nucleic Acid
aggtaatgggctagctacaacgataaaacaa

SEQ ID NO: 2523 - DNA, 31 bp, Artificial Sequence
  Description of Artificial Sequence:  Enzymatic Nucleic Acid
ttaggtaaggctagctacaacgagctaaaac

SEQ ID NO: 2524 - DNA, 31 bp, Artificial Sequence
  Description of Artificial Sequence:  Enzymatic Nucleic Acid
aaattaggggctagctacaacgaaatgctaa

SEQ ID NO: 2525 - DNA, 31 bp, Artificial Sequence
  Description of Artificial Sequence:  Enzymatic Nucleic Acid
gaaaaaaaggctagctacaacgataggtaat

SEQ ID NO: 2526 - DNA, 31 bp, Artificial Sequence
  Description of Artificial Sequence:  Enzymatic Nucleic Acid
gcatggagggctagctacaacgaaggaaaaa

SEQ ID NO: 2527 - DNA, 31 bp, Artificial Sequence
  Description of Artificial Sequence:  Enzymatic Nucleic Acid
agtctgcaggctagctacaacgaggagcagg

SEQ ID NO: 2528 - DNA, 31 bp, Artificial Sequence
  Description of Artificial Sequence:  Enzymatic Nucleic Acid
acagtctgggctagctacaacgaatggagca

SEQ ID NO: 2529 - DNA, 31 bp, Artificial Sequence
  Description of Artificial Sequence:  Enzymatic Nucleic Acid
gctaacagggctagctacaacgactgcatgg

SEQ ID NO: 2530 - DNA, 31 bp, Artificial Sequence
  Description of Artificial Sequence:  Enzymatic Nucleic Acid
aaagctaaggctagctacaacgaagtctgca

SEQ ID NO: 2531 - DNA, 31 bp, Artificial Sequence
  Description of Artificial Sequence:  Enzymatic Nucleic Acid
ggtaaaagggctagctacaacgataacagtc

SEQ ID NO: 2532 - DNA, 31 bp, Artificial Sequence
  Description of Artificial Sequence:  Enzymatic Nucleic Acid
atttaaggggctagctacaacgaaaaagcta

SEQ ID NO: 2533 - DNA, 31 bp, Artificial Sequence
  Description of Artificial Sequence:  Enzymatic Nucleic Acid
aataagcaggctagctacaacgattaaggta

SEQ ID NO: 2534 - DNA, 31 bp, Artificial Sequence
  Description of Artificial Sequence:  Enzymatic Nucleic Acid
aaaataagggctagctacaacgaatttaagg

SEQ ID NO: 2535 - DNA, 31 bp, Artificial Sequence
  Description of Artificial Sequence:  Enzymatic Nucleic Acid
ttttaaaaggctagctacaacgaaagcattt

SEQ ID NO: 2536 - DNA, 31 bp, Artificial Sequence
  Description of Artificial Sequence:  Enzymatic Nucleic Acid
cactgtcaggctagctacaacgatttaaaat

SEQ ID NO: 2537 - DNA, 31 bp, Artificial Sequence
  Description of Artificial Sequence:  Enzymatic Nucleic Acid
ttccactgggctagctacaacgacattttaa

SEQ ID NO: 2538 - DNA, 31 bp, Artificial Sequence
  Description of Artificial Sequence:  Enzymatic Nucleic Acid
aacttccaggctagctacaacgatgtcattt

SEQ ID NO: 2539 - DNA, 31 bp, Artificial Sequence
  Description of Artificial Sequence:  Enzymatic Nucleic Acid
aaaaaaaaggctagctacaacgattccactg

SEQ ID NO: 2540 - DNA, 31 bp, Artificial Sequence
  Description of Artificial Sequence:  Enzymatic Nucleic Acid
tactggcaggctagctacaacgattcgagga

SEQ ID NO: 2541 - DNA, 31 bp, Artificial Sequence
  Description of Artificial Sequence:  Enzymatic Nucleic Acid
aatactggggctagctacaacgaacttcgag

SEQ ID NO: 2542 - DNA, 31 bp, Artificial Sequence
  Description of Artificial Sequence:  Enzymatic Nucleic Acid
tgggaataggctagctacaacgatggcactt

SEQ ID NO: 2543 - DNA, 31 bp, Artificial Sequence
  Description of Artificial Sequence:  Enzymatic Nucleic Acid
tctgggaaggctagctacaacgaactggcac

SEQ ID NO: 2544 - DNA, 31 bp, Artificial Sequence
  Description of Artificial Sequence:  Enzymatic Nucleic Acid
aaccaaaaggctagctacaacgatctgggaa

SEQ ID NO: 2545 - DNA, 31 bp, Artificial Sequence
  Description of Artificial Sequence:  Enzymatic Nucleic Acid
ttcaaaaaggctagctacaacgacaaaactc

SEQ ID NO: 2546 - DNA, 31 bp, Artificial Sequence
  Description of Artificial Sequence:  Enzymatic Nucleic Acid
attgctagggctagctacaacgatcaaaaac

SEQ ID NO: 2547 - DNA, 31 bp, Artificial Sequence
  Description of Artificial Sequence:  Enzymatic Nucleic Acid
aggcattgggctagctacaacgatagttcaa

SEQ ID NO: 2548 - DNA, 31 bp, Artificial Sequence
  Description of Artificial Sequence:  Enzymatic Nucleic Acid
cacaggcaggctagctacaacgatgctagtt

SEQ ID NO: 2549 - DNA, 31 bp, Artificial Sequence
  Description of Artificial Sequence:  Enzymatic Nucleic Acid
ttcacaggggctagctacaacgaattgctag

SEQ ID NO: 2550 - DNA, 31 bp, Artificial Sequence
  Description of Artificial Sequence:  Enzymatic Nucleic Acid
ctttttcaggctagctacaacgaaggcattg

SEQ ID NO: 2551 - DNA, 31 bp, Artificial Sequence
  Description of Artificial Sequence:  Enzymatic Nucleic Acid
gtattcagggctagctacaacgattcttttt

SEQ ID NO: 2552 - DNA, 31 bp, Artificial Sequence
  Description of Artificial Sequence:  Enzymatic Nucleic Acid
cttaggtaggctagctacaacgatcagtttc

SEQ ID NO: 2553 - DNA, 31 bp, Artificial Sequence
  Description of Artificial Sequence:  Enzymatic Nucleic Acid
atcttaggggctagctacaacgaattcagtt

SEQ ID NO: 2554 - DNA, 31 bp, Artificial Sequence
  Description of Artificial Sequence:  Enzymatic Nucleic Acid
gacagaaaggctagctacaacgacttaggta

SEQ ID NO: 2555 - DNA, 31 bp, Artificial Sequence
  Description of Artificial Sequence:  Enzymatic Nucleic Acid
ccccaagaggctagctacaacgaagaaatct

SEQ ID NO: 2556 - DNA, 31 bp, Artificial Sequence
  Description of Artificial Sequence:  Enzymatic Nucleic Acid
accaaaaaggctagctacaacgacccaagac

SEQ ID NO: 2557 - DNA, 31 bp, Artificial Sequence
  Description of Artificial Sequence:  Enzymatic Nucleic Acid
tgcatgcaggctagctacaacgacaaaaacc

SEQ ID NO: 2558 - DNA, 31 bp, Artificial Sequence
  Description of Artificial Sequence:  Enzymatic Nucleic Acid
actgcatgggctagctacaacgaaccaaaaa

SEQ ID NO: 2559 - DNA, 31 bp, Artificial Sequence
  Description of Artificial Sequence:  Enzymatic Nucleic Acid
caactgcaggctagctacaacgagcaccaaa

SEQ ID NO: 2560 - DNA, 31 bp, Artificial Sequence
  Description of Artificial Sequence:  Enzymatic Nucleic Acid
atcaactgggctagctacaacgaatgcacca

SEQ ID NO: 2561 - DNA, 31 bp, Artificial Sequence
  Description of Artificial Sequence:  Enzymatic Nucleic Acid
gtaatcaaggctagctacaacgatgcatgca

SEQ ID NO: 2562 - DNA, 31 bp, Artificial Sequence
  Description of Artificial Sequence:  Enzymatic Nucleic Acid
agaagtaaggctagctacaacgacaactgca

SEQ ID NO: 2563 - DNA, 31 bp, Artificial Sequence
  Description of Artificial Sequence:  Enzymatic Nucleic Acid
ataagaagggctagctacaacgaaatcaact

SEQ ID NO: 2564 - DNA, 31 bp, Artificial Sequence
  Description of Artificial Sequence:  Enzymatic Nucleic Acid
aagaaaaaggctagctacaacgaaagaagta

SEQ ID NO: 2565 - DNA, 31 bp, Artificial Sequence
  Description of Artificial Sequence:  Enzymatic Nucleic Acid
acacttggggctagctacaacgaaagaaaaa

SEQ ID NO: 2566 - DNA, 31 bp, Artificial Sequence
  Description of Artificial Sequence:  Enzymatic Nucleic Acid
cattcacaggctagctacaacgattggtaag

SEQ ID NO: 2567 - DNA, 31 bp, Artificial Sequence
  Description of Artificial Sequence:  Enzymatic Nucleic Acid
aacattcaggctagctacaacgaacttggta

SEQ ID NO: 2568 - DNA, 31 bp, Artificial Sequence
  Description of Artificial Sequence:  Enzymatic Nucleic Acid
caccaacaggctagctacaacgatcacactt

SEQ ID NO: 2569 - DNA, 31 bp, Artificial Sequence
  Description of Artificial Sequence:  Enzymatic Nucleic Acid
cacaccaaggctagctacaacgaattcacac

SEQ ID NO: 2570 - DNA, 31 bp, Artificial Sequence
  Description of Artificial Sequence:  Enzymatic Nucleic Acid
gtttcacaggctagctacaacgacaacattc

SEQ ID NO: 2571 - DNA, 31 bp, Artificial Sequence
  Description of Artificial Sequence:  Enzymatic Nucleic Acid
ttgtttcaggctagctacaacgaaccaacat

SEQ ID NO: 2572 - DNA, 31 bp, Artificial Sequence
  Description of Artificial Sequence:  Enzymatic Nucleic Acid
ttaatttgggctagctacaacgattcacacc

SEQ ID NO: 2573 - DNA, 31 bp, Artificial Sequence
  Description of Artificial Sequence:  Enzymatic Nucleic Acid
ttcattaaggctagctacaacgattgtttca

SEQ ID NO: 2574 - DNA, 31 bp, Artificial Sequence
  Description of Artificial Sequence:  Enzymatic Nucleic Acid
aagcttcaggctagctacaacgataatttgt

SEQ ID NO: 2575 - DNA, 31 bp, Artificial Sequence
  Description of Artificial Sequence:  Enzymatic Nucleic Acid
ttcaaaagggctagctacaacgattcattaa

SEQ ID NO: 2576 - DNA, 31 bp, Artificial Sequence
  Description of Artificial Sequence:  Enzymatic Nucleic Acid
agggatgaggctagctacaacgatcaaaagc

SEQ ID NO: 2577 - DNA, 31 bp, Artificial Sequence
  Description of Artificial Sequence:  Enzymatic Nucleic Acid
aatagggaggctagctacaacgagattcaaa

SEQ ID NO: 2578 - DNA, 31 bp, Artificial Sequence
  Description of Artificial Sequence:  Enzymatic Nucleic Acid
acacagaaggctagctacaacgaagggatga

SEQ ID NO: 2579 - DNA, 31 bp, Artificial Sequence
  Description of Artificial Sequence:  Enzymatic Nucleic Acid
ataaaacaggctagctacaacgaagaatagg

SEQ ID NO: 2580 - DNA, 31 bp, Artificial Sequence
  Description of Artificial Sequence:  Enzymatic Nucleic Acid
agataaaaggctagctacaacgaacagaata

SEQ ID NO: 2581 - DNA, 31 bp, Artificial Sequence
  Description of Artificial Sequence:  Enzymatic Nucleic Acid
tgactagaggctagctacaacgaaaaacaca

SEQ ID NO: 2582 - DNA, 31 bp, Artificial Sequence
  Description of Artificial Sequence:  Enzymatic Nucleic Acid
ttatgtgaggctagctacaacgatagataaa

SEQ ID NO: 2583 - DNA, 31 bp, Artificial Sequence
  Description of Artificial Sequence:  Enzymatic Nucleic Acid
catttatgggctagctacaacgagactagat

SEQ ID NO: 2584 - DNA, 31 bp, Artificial Sequence
  Description of Artificial Sequence:  Enzymatic Nucleic Acid
tccatttaggctagctacaacgagtgactag

SEQ ID NO: 2585 - DNA, 31 bp, Artificial Sequence
  Description of Artificial Sequence:  Enzymatic Nucleic Acid
ttaatccaggctagctacaacgattatgtga

SEQ ID NO: 2586 - DNA, 31 bp, Artificial Sequence
  Description of Artificial Sequence:  Enzymatic Nucleic Acid
gtaattaaggctagctacaacgaccatttat

SEQ ID NO: 2587 - DNA, 31 bp, Artificial Sequence
  Description of Artificial Sequence:  Enzymatic Nucleic Acid
attagtaaggctagctacaacgataatccat

SEQ ID NO: 2588 - DNA, 31 bp, Artificial Sequence
  Description of Artificial Sequence:  Enzymatic Nucleic Acid
gaaattagggctagctacaacgaaattaatc

SEQ ID NO: 2589 - DNA, 31 bp, Artificial Sequence
  Description of Artificial Sequence:  Enzymatic Nucleic Acid
aactgaaaggctagctacaacgatagtaatt

SEQ ID NO: 2590 - DNA, 31 bp, Artificial Sequence
  Description of Artificial Sequence:  Enzymatic Nucleic Acid
ggtctcaaggctagctacaacgatgaaatta

SEQ ID NO: 2591 - DNA, 31 bp, Artificial Sequence
  Description of Artificial Sequence:  Enzymatic Nucleic Acid
ttagaaggggctagctacaacgactcaactg

SEQ ID NO: 2592 - DNA, 31 bp, Artificial Sequence
  Description of Artificial Sequence:  Enzymatic Nucleic Acid
aaaaccaaggctagctacaacgatagaaggt

SEQ ID NO: 2593 - DNA, 31 bp, Artificial Sequence
  Description of Artificial Sequence:  Enzymatic Nucleic Acid
agtaaaaaggctagctacaacgacaattaga

SEQ ID NO: 2594 - DNA, 31 bp, Artificial Sequence
  Description of Artificial Sequence:  Enzymatic Nucleic Acid
tgtttcagggctagctacaacgaaaaaacca

SEQ ID NO: 2595 - DNA, 31 bp, Artificial Sequence
  Description of Artificial Sequence:  Enzymatic Nucleic Acid
cctcaatgggctagctacaacgattcagtaa

SEQ ID NO: 2596 - DNA, 31 bp, Artificial Sequence
  Description of Artificial Sequence:  Enzymatic Nucleic Acid
tccctcaaggctagctacaacgagtttcagt

SEQ ID NO: 2597 - DNA, 31 bp, Artificial Sequence
  Description of Artificial Sequence:  Enzymatic Nucleic Acid
aatttgtgggctagctacaacgaccctcaat

SEQ ID NO: 2598 - DNA, 31 bp, Artificial Sequence
  Description of Artificial Sequence:  Enzymatic Nucleic Acid
taaatttgggctagctacaacgagtccctca

SEQ ID NO: 2599 - DNA, 31 bp, Artificial Sequence
  Description of Artificial Sequence:  Enzymatic Nucleic Acid
cccataaaggctagctacaacgattgtgtcc

SEQ ID NO: 2600 - DNA, 31 bp, Artificial Sequence
  Description of Artificial Sequence:  Enzymatic Nucleic Acid
gaagcccaggctagctacaacgaaaatttgt

SEQ ID NO: 2601 - DNA, 31 bp, Artificial Sequence
  Description of Artificial Sequence:  Enzymatic Nucleic Acid
tcaggaagggctagctacaacgaccataaat

SEQ ID NO: 2602 - DNA, 31 bp, Artificial Sequence
  Description of Artificial Sequence:  Enzymatic Nucleic Acid
aatcatcaggctagctacaacgacaggaagc

SEQ ID NO: 2603 - DNA, 31 bp, Artificial Sequence
  Description of Artificial Sequence:  Enzymatic Nucleic Acid
aagaatcaggctagctacaacgacatcagga

SEQ ID NO: 2604 - DNA, 31 bp, Artificial Sequence
  Description of Artificial Sequence:  Enzymatic Nucleic Acid
tagaagaaggctagctacaacgacatcatca

SEQ ID NO: 2605 - DNA, 31 bp, Artificial Sequence
  Description of Artificial Sequence:  Enzymatic Nucleic Acid
acatgatgggctagctacaacgactagaaga

SEQ ID NO: 2606 - DNA, 31 bp, Artificial Sequence
  Description of Artificial Sequence:  Enzymatic Nucleic Acid
ggacatgaggctagctacaacgagcctagaa

SEQ ID NO: 2607 - DNA, 31 bp, Artificial Sequence
  Description of Artificial Sequence:  Enzymatic Nucleic Acid
ataggacaggctagctacaacgagatgccta

SEQ ID NO: 2608 - DNA, 31 bp, Artificial Sequence
  Description of Artificial Sequence:  Enzymatic Nucleic Acid
ctataggaggctagctacaacgaatgatgcc

SEQ ID NO: 2609 - DNA, 31 bp, Artificial Sequence
  Description of Artificial Sequence:  Enzymatic Nucleic Acid
acaaactaggctagctacaacgaaggacatg

SEQ ID NO: 2610 - DNA, 31 bp, Artificial Sequence
  Description of Artificial Sequence:  Enzymatic Nucleic Acid
atgacaaaggctagctacaacgatataggac

SEQ ID NO: 2611 - DNA, 31 bp, Artificial Sequence
  Description of Artificial Sequence:  Enzymatic Nucleic Acid
agggatgaggctagctacaacgaaaactata

SEQ ID NO: 2612 - DNA, 31 bp, Artificial Sequence
  Description of Artificial Sequence:  Enzymatic Nucleic Acid
atcagggaggctagctacaacgagacaaact

SEQ ID NO: 2613 - DNA, 31 bp, Artificial Sequence
  Description of Artificial Sequence:  Enzymatic Nucleic Acid
tacattcaggctagctacaacgacagggatg

SEQ ID NO: 2614 - DNA, 31 bp, Artificial Sequence
  Description of Artificial Sequence:  Enzymatic Nucleic Acid
actttacaggctagctacaacgatcatcagg

SEQ ID NO: 2615 - DNA, 31 bp, Artificial Sequence
  Description of Artificial Sequence:  Enzymatic Nucleic Acid
taactttaggctagctacaacgaattcatca

SEQ ID NO: 2616 - DNA, 31 bp, Artificial Sequence
  Description of Artificial Sequence:  Enzymatic Nucleic Acid
cagtgtaaggctagctacaacgatttacatt

SEQ ID NO: 2617 - DNA, 31 bp, Artificial Sequence
  Description of Artificial Sequence:  Enzymatic Nucleic Acid
gaacagtgggctagctacaacgaaactttac

SEQ ID NO: 2618 - DNA, 31 bp, Artificial Sequence
  Description of Artificial Sequence:  Enzymatic Nucleic Acid
gtgaacagggctagctacaacgagtaacttt

SEQ ID NO: 2619 - DNA, 31 bp, Artificial Sequence
  Description of Artificial Sequence:  Enzymatic Nucleic Acid
tttgtgaaggctagctacaacgaagtgtaac

SEQ ID NO: 2620 - DNA, 31 bp, Artificial Sequence
  Description of Artificial Sequence:  Enzymatic Nucleic Acid
aacctttgggctagctacaacgagaacagtg

SEQ ID NO: 2621 - DNA, 31 bp, Artificial Sequence
  Description of Artificial Sequence:  Enzymatic Nucleic Acid
agacaaaaggctagctacaacgactttgtga

SEQ ID NO: 2622 - DNA, 31 bp, Artificial Sequence
  Description of Artificial Sequence:  Enzymatic Nucleic Acid
aaaggagaggctagctacaacgaaaaacctt

SEQ ID NO: 2623 - DNA, 31 bp, Artificial Sequence
  Description of Artificial Sequence:  Enzymatic Nucleic Acid
aatagcagggctagctacaacgaggaaagga

SEQ ID NO: 2624 - DNA, 31 bp, Artificial Sequence
  Description of Artificial Sequence:  Enzymatic Nucleic Acid
actaatagggctagctacaacgaagtggaaa

SEQ ID NO: 2625 - DNA, 31 bp, Artificial Sequence
  Description of Artificial Sequence:  Enzymatic Nucleic Acid
atgactaaggctagctacaacgaagcagtgg

SEQ ID NO: 2626 - DNA, 31 bp, Artificial Sequence
  Description of Artificial Sequence:  Enzymatic Nucleic Acid
gaccatgaggctagctacaacgataatagca

SEQ ID NO: 2627 - DNA, 31 bp, Artificial Sequence
  Description of Artificial Sequence:  Enzymatic Nucleic Acid
agtgaccaggctagctacaacgagactaata

SEQ ID NO: 2628 - DNA, 31 bp, Artificial Sequence
  Description of Artificial Sequence:  Enzymatic Nucleic Acid
gagagtgaggctagctacaacgacatgacta

SEQ ID NO: 2629 - DNA, 31 bp, Artificial Sequence
  Description of Artificial Sequence:  Enzymatic Nucleic Acid
ggggagagggctagctacaacgagaccatga

SEQ ID NO: 2630 - DNA, 31 bp, Artificial Sequence
  Description of Artificial Sequence:  Enzymatic Nucleic Acid
atataataggctagctacaacgatttgggga

SEQ ID NO: 2631 - DNA, 31 bp, Artificial Sequence
  Description of Artificial Sequence:  Enzymatic Nucleic Acid
aaatataaggctagctacaacgaattttggg

SEQ ID NO: 2632 - DNA, 31 bp, Artificial Sequence
  Description of Artificial Sequence:  Enzymatic Nucleic Acid
aaaaaataggctagctacaacgaaatatttt

SEQ ID NO: 2633 - DNA, 31 bp, Artificial Sequence
  Description of Artificial Sequence:  Enzymatic Nucleic Acid
agaaaaaaggctagctacaacgaataatatt

SEQ ID NO: 2634 - DNA, 31 bp, Artificial Sequence
  Description of Artificial Sequence:  Enzymatic Nucleic Acid
tctttttaggctagctacaacgaagaaaaaa

SEQ ID NO: 2635 - DNA, 31 bp, Artificial Sequence
  Description of Artificial Sequence:  Enzymatic Nucleic Acid
tttttccaggctagctacaacgattttttct

SEQ ID NO: 2636 - DNA, 31 bp, Artificial Sequence
  Description of Artificial Sequence:  Enzymatic Nucleic Acid
ccttgtaaggctagctacaacgattttttcc

SEQ ID NO: 2637 - DNA, 31 bp, Artificial Sequence
  Description of Artificial Sequence:  Enzymatic Nucleic Acid
ttgccttgggctagctacaacgaaatttttt

SEQ ID NO: 2638 - DNA, 31 bp, Artificial Sequence
  Description of Artificial Sequence:  Enzymatic Nucleic Acid
ttccattgggctagctacaacgacttgtaat

SEQ ID NO: 2639 - DNA, 31 bp, Artificial Sequence
  Description of Artificial Sequence:  Enzymatic Nucleic Acid
agtttccaggctagctacaacgatgccttgt

SEQ ID NO: 2640 - DNA, 31 bp, Artificial Sequence
  Description of Artificial Sequence:  Enzymatic Nucleic Acid
tataatagggctagctacaacgattccattg

SEQ ID NO: 2641 - DNA, 31 bp, Artificial Sequence
  Description of Artificial Sequence:  Enzymatic Nucleic Acid
ccttataaggctagctacaacgaagtttcca

SEQ ID NO: 2642 - DNA, 31 bp, Artificial Sequence
  Description of Artificial Sequence:  Enzymatic Nucleic Acid
tggccttaggctagctacaacgaaatagttt

SEQ ID NO: 2643 - DNA, 31 bp, Artificial Sequence
  Description of Artificial Sequence:  Enzymatic Nucleic Acid
ggaaatggggctagctacaacgacttataat

SEQ ID NO: 2644 - DNA, 31 bp, Artificial Sequence
  Description of Artificial Sequence:  Enzymatic Nucleic Acid
aaaggaaaggctagctacaacgaggccttat

SEQ ID NO: 2645 - DNA, 31 bp, Artificial Sequence
  Description of Artificial Sequence:  Enzymatic Nucleic Acid
atctaatgggctagctacaacgagaaaagga

SEQ ID NO: 2646 - DNA, 31 bp, Artificial Sequence
  Description of Artificial Sequence:  Enzymatic Nucleic Acid
ttatctaaggctagctacaacgagtgaaaag

SEQ ID NO: 2647 - DNA, 31 bp, Artificial Sequence
  Description of Artificial Sequence:  Enzymatic Nucleic Acid
gtaatttaggctagctacaacgactaatgtg

SEQ ID NO: 2648 - DNA, 31 bp, Artificial Sequence
  Description of Artificial Sequence:  Enzymatic Nucleic Acid
tatagtaaggctagctacaacgattatctaa

SEQ ID NO: 2649 - DNA, 31 bp, Artificial Sequence
  Description of Artificial Sequence:  Enzymatic Nucleic Acid
ctttatagggctagctacaacgaaatttatc

SEQ ID NO: 2650 - DNA, 31 bp, Artificial Sequence
  Description of Artificial Sequence:  Enzymatic Nucleic Acid
agtctttaggctagctacaacgaagtaattt

SEQ ID NO: 2651 - DNA, 31 bp, Artificial Sequence
  Description of Artificial Sequence:  Enzymatic Nucleic Acid
attaggagggctagctacaacgactttatag

SEQ ID NO: 2652 - DNA, 31 bp, Artificial Sequence
  Description of Artificial Sequence:  Enzymatic Nucleic Acid
aaaagctaggctagctacaacgataggagtc

SEQ ID NO: 2653 - DNA, 31 bp, Artificial Sequence
  Description of Artificial Sequence:  Enzymatic Nucleic Acid
ggaaaaagggctagctacaacgatattagga

SEQ ID NO: 2654 - DNA, 31 bp, Artificial Sequence
  Description of Artificial Sequence:  Enzymatic Nucleic Acid
tgccttaaggctagctacaacgaaggaaaaa

SEQ ID NO: 2655 - DNA, 31 bp, Artificial Sequence
  Description of Artificial Sequence:  Enzymatic Nucleic Acid
tgggtctgggctagctacaacgacttaacag

SEQ ID NO: 2656 - DNA, 31 bp, Artificial Sequence
  Description of Artificial Sequence:  Enzymatic Nucleic Acid
atactgggggctagctacaacgactgcctta

SEQ ID NO: 2657 - DNA, 31 bp, Artificial Sequence
  Description of Artificial Sequence:  Enzymatic Nucleic Acid
cattcataggctagctacaacgatgggtctg

SEQ ID NO: 2658 - DNA, 31 bp, Artificial Sequence
  Description of Artificial Sequence:  Enzymatic Nucleic Acid
cccattcaggctagctacaacgaactgggtc

SEQ ID NO: 2659 - DNA, 31 bp, Artificial Sequence
  Description of Artificial Sequence:  Enzymatic Nucleic Acid
taatcccaggctagctacaacgatcatactg

SEQ ID NO: 2660 - DNA, 31 bp, Artificial Sequence
  Description of Artificial Sequence:  Enzymatic Nucleic Acid
tataataaggctagctacaacgacccattca

SEQ ID NO: 2661 - DNA, 31 bp, Artificial Sequence
  Description of Artificial Sequence:  Enzymatic Nucleic Acid
tgctataaggctagctacaacgaaatcccat

SEQ ID NO: 2662 - DNA, 31 bp, Artificial Sequence
  Description of Artificial Sequence:  Enzymatic Nucleic Acid
ggttgctaggctagctacaacgaaataatcc

SEQ ID NO: 2663 - DNA, 31 bp, Artificial Sequence
  Description of Artificial Sequence:  Enzymatic Nucleic Acid
aatggttgggctagctacaacgatataataa

SEQ ID NO: 2664 - DNA, 31 bp, Artificial Sequence
  Description of Artificial Sequence:  Enzymatic Nucleic Acid
caaaatggggctagctacaacgatgctataa

SEQ ID NO: 2665 - DNA, 31 bp, Artificial Sequence
  Description of Artificial Sequence:  Enzymatic Nucleic Acid
ccccaaaaggctagctacaacgaggttgcta

SEQ ID NO: 2666 - DNA, 31 bp, Artificial Sequence
  Description of Artificial Sequence:  Enzymatic Nucleic Acid
aaatatagggctagctacaacgacccaaaat

SEQ ID NO: 2667 - DNA, 31 bp, Artificial Sequence
  Description of Artificial Sequence:  Enzymatic Nucleic Acid
tgtaaataggctagctacaacgaagccccaa

SEQ ID NO: 2668 - DNA, 31 bp, Artificial Sequence
  Description of Artificial Sequence:  Enzymatic Nucleic Acid
catgtaaaggctagctacaacgaatagcccc

SEQ ID NO: 2669 - DNA, 31 bp, Artificial Sequence
  Description of Artificial Sequence:  Enzymatic Nucleic Acid
gtagcatgggctagctacaacgaaaatatag

SEQ ID NO: 2670 - DNA, 31 bp, Artificial Sequence
  Description of Artificial Sequence:  Enzymatic Nucleic Acid
tagtagcaggctagctacaacgagtaaatat

SEQ ID NO: 2671 - DNA, 31 bp, Artificial Sequence
  Description of Artificial Sequence:  Enzymatic Nucleic Acid
tttagtagggctagctacaacgaatgtaaat

SEQ ID NO: 2672 - DNA, 31 bp, Artificial Sequence
  Description of Artificial Sequence:  Enzymatic Nucleic Acid
aaatttagggctagctacaacgaagcatgta

SEQ ID NO: 2673 - DNA, 31 bp, Artificial Sequence
  Description of Artificial Sequence:  Enzymatic Nucleic Acid
tataaaaaggctagctacaacgattagtagc

SEQ ID NO: 2674 - DNA, 31 bp, Artificial Sequence
  Description of Artificial Sequence:  Enzymatic Nucleic Acid
aattattaggctagctacaacgaaaaaattt

SEQ ID NO: 2675 - DNA, 31 bp, Artificial Sequence
  Description of Artificial Sequence:  Enzymatic Nucleic Acid
ttcaattaggctagctacaacgatataaaaa

SEQ ID NO: 2676 - DNA, 31 bp, Artificial Sequence
  Description of Artificial Sequence:  Enzymatic Nucleic Acid
cttttcaaggctagctacaacgatattataa

SEQ ID NO: 2677 - DNA, 31 bp, Artificial Sequence
  Description of Artificial Sequence:  Enzymatic Nucleic Acid
tgttaaaaggctagctacaacgacttttcaa

SEQ ID NO: 2678 - DNA, 31 bp, Artificial Sequence
  Description of Artificial Sequence:  Enzymatic Nucleic Acid
tatacttgggctagctacaacgataaaatct

SEQ ID NO: 2679 - DNA, 31 bp, Artificial Sequence
  Description of Artificial Sequence:  Enzymatic Nucleic Acid
tttttataggctagctacaacgattgttaaa

SEQ ID NO: 2680 - DNA, 31 bp, Artificial Sequence
  Description of Artificial Sequence:  Enzymatic Nucleic Acid
tttttttaggctagctacaacgaacttgtta

SEQ ID NO: 2681 - DNA, 31 bp, Artificial Sequence
  Description of Artificial Sequence:  Enzymatic Nucleic Acid
tatgagaaggctagctacaacgattttttat

SEQ ID NO: 2682 - DNA, 31 bp, Artificial Sequence
  Description of Artificial Sequence:  Enzymatic Nucleic Acid
aattcctaggctagctacaacgagagaattt

SEQ ID NO: 2683 - DNA, 31 bp, Artificial Sequence
  Description of Artificial Sequence:  Enzymatic Nucleic Acid
acatttaaggctagctacaacgatcctatga

SEQ ID NO: 2684 - DNA, 31 bp, Artificial Sequence
  Description of Artificial Sequence:  Enzymatic Nucleic Acid
agactacaggctagctacaacgattaattcc

SEQ ID NO: 2685 - DNA, 31 bp, Artificial Sequence
  Description of Artificial Sequence:  Enzymatic Nucleic Acid
ggagactaggctagctacaacgaatttaatt

SEQ ID NO: 2686 - DNA, 31 bp, Artificial Sequence
  Description of Artificial Sequence:  Enzymatic Nucleic Acid
cagggagaggctagctacaacgatacattta

SEQ ID NO: 2687 - DNA, 31 bp, Artificial Sequence
  Description of Artificial Sequence:  Enzymatic Nucleic Acid
gtctgacaggctagctacaacgaagggagac

SEQ ID NO: 2688 - DNA, 31 bp, Artificial Sequence
  Description of Artificial Sequence:  Enzymatic Nucleic Acid
cagtctgaggctagctacaacgaacagggag

SEQ ID NO: 2689 - DNA, 31 bp, Artificial Sequence
  Description of Artificial Sequence:  Enzymatic Nucleic Acid
aagagcagggctagctacaacgactgacaca

SEQ ID NO: 2690 - DNA, 31 bp, Artificial Sequence
  Description of Artificial Sequence:  Enzymatic Nucleic Acid
tgaaagagggctagctacaacgaagtctgac

SEQ ID NO: 2691 - DNA, 31 bp, Artificial Sequence
  Description of Artificial Sequence:  Enzymatic Nucleic Acid
ttatactaggctagctacaacgagaaagagc

SEQ ID NO: 2692 - DNA, 31 bp, Artificial Sequence
  Description of Artificial Sequence:  Enzymatic Nucleic Acid
aagttataggctagctacaacgatatgaaag

SEQ ID NO: 2693 - DNA, 31 bp, Artificial Sequence
  Description of Artificial Sequence:  Enzymatic Nucleic Acid
taaagttaggctagctacaacgaactatgaa

SEQ ID NO: 2694 - DNA, 31 bp, Artificial Sequence
  Description of Artificial Sequence:  Enzymatic Nucleic Acid
atttaaagggctagctacaacgatatactat

SEQ ID NO: 2695 - DNA, 31 bp, Artificial Sequence
  Description of Artificial Sequence:  Enzymatic Nucleic Acid
agaaaagaggctagctacaacgattaaagtt

SEQ ID NO: 2696 - DNA, 31 bp, Artificial Sequence
  Description of Artificial Sequence:  Enzymatic Nucleic Acid
gactcaagggctagctacaacgatgaagaaa

SEQ ID NO: 2697 - DNA, 31 bp, Artificial Sequence
  Description of Artificial Sequence:  Enzymatic Nucleic Acid
ttcaaagaggctagctacaacgatcaagttg

SEQ ID NO: 2698 - DNA, 31 bp, Artificial Sequence
  Description of Artificial Sequence:  Enzymatic Nucleic Acid
taaaactaggctagctacaacgacttcaaag

SEQ ID NO: 2699 - DNA, 31 bp, Artificial Sequence
  Description of Artificial Sequence:  Enzymatic Nucleic Acid
aattaaaaggctagctacaacgatatcttca

SEQ ID NO: 2700 - DNA, 31 bp, Artificial Sequence
  Description of Artificial Sequence:  Enzymatic Nucleic Acid
aagcagaaggctagctacaacgataaaacta

SEQ ID NO: 2701 - DNA, 31 bp, Artificial Sequence
  Description of Artificial Sequence:  Enzymatic Nucleic Acid
gtcacaagggctagctacaacgaagaattaa

SEQ ID NO: 2702 - DNA, 31 bp, Artificial Sequence
  Description of Artificial Sequence:  Enzymatic Nucleic Acid
taatgtcaggctagctacaacgaaagcagaa

SEQ ID NO: 2703 - DNA, 31 bp, Artificial Sequence
  Description of Artificial Sequence:  Enzymatic Nucleic Acid
ttttaatgggctagctacaacgacacaagca

SEQ ID NO: 2704 - DNA, 31 bp, Artificial Sequence
  Description of Artificial Sequence:  Enzymatic Nucleic Acid
tcttttaaggctagctacaacgagtcacaag

SEQ ID NO: 2705 - DNA, 31 bp, Artificial Sequence
  Description of Artificial Sequence:  Enzymatic Nucleic Acid
ccaaataaggctagctacaacgacttttaat

SEQ ID NO: 2706 - DNA, 31 bp, Artificial Sequence
  Description of Artificial Sequence:  Enzymatic Nucleic Acid
ggcccaaaggctagctacaacgaaatctttt

SEQ ID NO: 2707 - DNA, 31 bp, Artificial Sequence
  Description of Artificial Sequence:  Enzymatic Nucleic Acid
ataactggggctagctacaacgaccaaataa

SEQ ID NO: 2708 - DNA, 31 bp, Artificial Sequence
  Description of Artificial Sequence:  Enzymatic Nucleic Acid
agctataaggctagctacaacgatggcccaa

SEQ ID NO: 2709 - DNA, 31 bp, Artificial Sequence
  Description of Artificial Sequence:  Enzymatic Nucleic Acid
ataagctaggctagctacaacgaaactggcc

SEQ ID NO: 2710 - DNA, 31 bp, Artificial Sequence
  Description of Artificial Sequence:  Enzymatic Nucleic Acid
ctaataagggctagctacaacgatataactg

SEQ ID NO: 2711 - DNA, 31 bp, Artificial Sequence
  Description of Artificial Sequence:  Enzymatic Nucleic Acid
acacctaaggctagctacaacgaaagctata

SEQ ID NO: 2712 - DNA, 31 bp, Artificial Sequence
  Description of Artificial Sequence:  Enzymatic Nucleic Acid
cttcaacaggctagctacaacgactaataag

SEQ ID NO: 2713 - DNA, 31 bp, Artificial Sequence
  Description of Artificial Sequence:  Enzymatic Nucleic Acid
ctcttcaaggctagctacaacgaacctaata

SEQ ID NO: 2714 - DNA, 31 bp, Artificial Sequence
  Description of Artificial Sequence:  Enzymatic Nucleic Acid
aaccttggggctagctacaacgactcttcaa

SEQ ID NO: 2715 - DNA, 31 bp, Artificial Sequence
  Description of Artificial Sequence:  Enzymatic Nucleic Acid
gcttgcaaggctagctacaacgacttggtct

SEQ ID NO: 2716 - DNA, 31 bp, Artificial Sequence
  Description of Artificial Sequence:  Enzymatic Nucleic Acid
ctggcttgggctagctacaacgaaaccttgg

SEQ ID NO: 2717 - DNA, 31 bp, Artificial Sequence
  Description of Artificial Sequence:  Enzymatic Nucleic Acid
gggcctggggctagctacaacgattgcaacc

SEQ ID NO: 2718 - DNA, 31 bp, Artificial Sequence
  Description of Artificial Sequence:  Enzymatic Nucleic Acid
acacagggggctagctacaacgactggcttg

SEQ ID NO: 2719 - DNA, 31 bp, Artificial Sequence
  Description of Artificial Sequence:  Enzymatic Nucleic Acid
ggttcacaggctagctacaacgaagggcctg

SEQ ID NO: 2720 - DNA, 31 bp, Artificial Sequence
  Description of Artificial Sequence:  Enzymatic Nucleic Acid
aaggttcaggctagctacaacgaacagggcc

SEQ ID NO: 2721 - DNA, 31 bp, Artificial Sequence
  Description of Artificial Sequence:  Enzymatic Nucleic Acid
gctcaaggggctagctacaacgatcacacag

SEQ ID NO: 2722 - DNA, 31 bp, Artificial Sequence
  Description of Artificial Sequence:  Enzymatic Nucleic Acid
tatgaaagggctagctacaacgatcaaggtt

SEQ ID NO: 2723 - DNA, 31 bp, Artificial Sequence
  Description of Artificial Sequence:  Enzymatic Nucleic Acid
actctctaggctagctacaacgagaaagctc

SEQ ID NO: 2724 - DNA, 31 bp, Artificial Sequence
  Description of Artificial Sequence:  Enzymatic Nucleic Acid
ctgtgaaaggctagctacaacgatctctatg

SEQ ID NO: 2725 - DNA, 31 bp, Artificial Sequence
  Description of Artificial Sequence:  Enzymatic Nucleic Acid
ccatgctgggctagctacaacgagaaactct

SEQ ID NO: 2726 - DNA, 31 bp, Artificial Sequence
  Description of Artificial Sequence:  Enzymatic Nucleic Acid
agtccatgggctagctacaacgatgtgaaac

SEQ ID NO: 2727 - DNA, 31 bp, Artificial Sequence
  Description of Artificial Sequence:  Enzymatic Nucleic Acid
acagtccaggctagctacaacgagctgtgaa

SEQ ID NO: 2728 - DNA, 31 bp, Artificial Sequence
  Description of Artificial Sequence:  Enzymatic Nucleic Acid
gcacacagggctagctacaacgaccatgctg

SEQ ID NO: 2729 - DNA, 31 bp, Artificial Sequence
  Description of Artificial Sequence:  Enzymatic Nucleic Acid
ggggcacaggctagctacaacgaagtccatg

SEQ ID NO: 2730 - DNA, 31 bp, Artificial Sequence
  Description of Artificial Sequence:  Enzymatic Nucleic Acid
gtggggcaggctagctacaacgaacagtcca

SEQ ID NO: 2731 - DNA, 31 bp, Artificial Sequence
  Description of Artificial Sequence:  Enzymatic Nucleic Acid
ccgtggggggctagctacaacgaacacagtc

SEQ ID NO: 2732 - DNA, 31 bp, Artificial Sequence
  Description of Artificial Sequence:  Enzymatic Nucleic Acid
gatgaccgggctagctacaacgaggggcaca

SEQ ID NO: 2733 - DNA, 31 bp, Artificial Sequence
  Description of Artificial Sequence:  Enzymatic Nucleic Acid
tcggatgaggctagctacaacgacgtggggc

SEQ ID NO: 2734 - DNA, 31 bp, Artificial Sequence
  Description of Artificial Sequence:  Enzymatic Nucleic Acid
cactcggaggctagctacaacgagaccgtgg

SEQ ID NO: 2735 - DNA, 31 bp, Artificial Sequence
  Description of Artificial Sequence:  Enzymatic Nucleic Acid
tacaaccaggctagctacaacgatcggatga

SEQ ID NO: 2736 - DNA, 31 bp, Artificial Sequence
  Description of Artificial Sequence:  Enzymatic Nucleic Acid
tcgtacaaggctagctacaacgacactcgga

SEQ ID NO: 2737 - DNA, 31 bp, Artificial Sequence
  Description of Artificial Sequence:  Enzymatic Nucleic Acid
gcatcgtaggctagctacaacgaaaccactc

SEQ ID NO: 2738 - DNA, 31 bp, Artificial Sequence
  Description of Artificial Sequence:  Enzymatic Nucleic Acid
atgcatcgggctagctacaacgaacaaccac

SEQ ID NO: 2739 - DNA, 31 bp, Artificial Sequence
  Description of Artificial Sequence:  Enzymatic Nucleic Acid
ccaatgcaggctagctacaacgacgtacaac

SEQ ID NO: 2740 - DNA, 31 bp, Artificial Sequence
  Description of Artificial Sequence:  Enzymatic Nucleic Acid
aaccaatgggctagctacaacgaatcgtaca

SEQ ID NO: 2741 - DNA, 31 bp, Artificial Sequence
  Description of Artificial Sequence:  Enzymatic Nucleic Acid
ctaaccaaggctagctacaacgagcatcgta

SEQ ID NO: 2742 - DNA, 31 bp, Artificial Sequence
  Description of Artificial Sequence:  Enzymatic Nucleic Acid
ttgactaaggctagctacaacgacaatgcat

SEQ ID NO: 2743 - DNA, 31 bp, Artificial Sequence
  Description of Artificial Sequence:  Enzymatic Nucleic Acid
atttttgaggctagctacaacgataaccaat

SEQ ID NO: 2744 - DNA, 31 bp, Artificial Sequence
  Description of Artificial Sequence:  Enzymatic Nucleic Acid
cctccccaggctagctacaacgattttgact

SEQ ID NO: 2745 - DNA, 31 bp, Artificial Sequence
  Description of Artificial Sequence:  Enzymatic Nucleic Acid
tgccctagggctagctacaacgaccctcccc

SEQ ID NO: 2746 - DNA, 31 bp, Artificial Sequence
  Description of Artificial Sequence:  Enzymatic Nucleic Acid
ccaaactgggctagctacaacgacctagtcc

SEQ ID NO: 2747 - DNA, 31 bp, Artificial Sequence
  Description of Artificial Sequence:  Enzymatic Nucleic Acid
tatccaaaggctagctacaacgatgccctag

SEQ ID NO: 2748 - DNA, 31 bp, Artificial Sequence
  Description of Artificial Sequence:  Enzymatic Nucleic Acid
ttgagctaggctagctacaacgaccaaactg

SEQ ID NO: 2749 - DNA, 31 bp, Artificial Sequence
  Description of Artificial Sequence:  Enzymatic Nucleic Acid
ttgttgagggctagctacaacgatatccaaa

SEQ ID NO: 2750 - DNA, 31 bp, Artificial Sequence
  Description of Artificial Sequence:  Enzymatic Nucleic Acid
gtatcttgggctagctacaacgatgagctat

SEQ ID NO: 2751 - DNA, 31 bp, Artificial Sequence
  Description of Artificial Sequence:  Enzymatic Nucleic Acid
agattgtaggctagctacaacgacttgttga

SEQ ID NO: 2752 - DNA, 31 bp, Artificial Sequence
  Description of Artificial Sequence:  Enzymatic Nucleic Acid
tgagattgggctagctacaacgaatcttgtt

SEQ ID NO: 2753 - DNA, 31 bp, Artificial Sequence
  Description of Artificial Sequence:  Enzymatic Nucleic Acid
gagtgagaggctagctacaacgatgtatctt

SEQ ID NO: 2754 - DNA, 31 bp, Artificial Sequence
  Description of Artificial Sequence:  Enzymatic Nucleic Acid
ccacagagggctagctacaacgagagattgt

SEQ ID NO: 2755 - DNA, 31 bp, Artificial Sequence
  Description of Artificial Sequence:  Enzymatic Nucleic Acid
gaccaccaggctagctacaacgaagagtgag

SEQ ID NO: 2756 - DNA, 31 bp, Artificial Sequence
  Description of Artificial Sequence:  Enzymatic Nucleic Acid
caggaccaggctagctacaacgacacagagt

SEQ ID NO: 2757 - DNA, 31 bp, Artificial Sequence
  Description of Artificial Sequence:  Enzymatic Nucleic Acid
cagcaggaggctagctacaacgacaccacag

SEQ ID NO: 2758 - DNA, 31 bp, Artificial Sequence
  Description of Artificial Sequence:  Enzymatic Nucleic Acid
tttgtcagggctagctacaacgaaggaccac

SEQ ID NO: 2759 - DNA, 31 bp, Artificial Sequence
  Description of Artificial Sequence:  Enzymatic Nucleic Acid
ttgatttgggctagctacaacgacagcagga

SEQ ID NO: 2760 - DNA, 31 bp, Artificial Sequence
  Description of Artificial Sequence:  Enzymatic Nucleic Acid
gctcttgaggctagctacaacgattgtcagc

SEQ ID NO: 2761 - DNA, 31 bp, Artificial Sequence
  Description of Artificial Sequence:  Enzymatic Nucleic Acid
aagcaatgggctagctacaacgatcttgatt

SEQ ID NO: 2762 - DNA, 31 bp, Artificial Sequence
  Description of Artificial Sequence:  Enzymatic Nucleic Acid
aaaagcaaggctagctacaacgagctcttga

SEQ ID NO: 2763 - DNA, 31 bp, Artificial Sequence
  Description of Artificial Sequence:  Enzymatic Nucleic Acid
aacaaaagggctagctacaacgaaatgctct

SEQ ID NO: 2764 - DNA, 31 bp, Artificial Sequence
  Description of Artificial Sequence:  Enzymatic Nucleic Acid
ttaagaaaggctagctacaacgaaaaagcaa

SEQ ID NO: 2765 - DNA, 31 bp, Artificial Sequence
  Description of Artificial Sequence:  Enzymatic Nucleic Acid
agagtttgggctagctacaacgatttcttaa

SEQ ID NO: 2766 - DNA, 31 bp, Artificial Sequence
  Description of Artificial Sequence:  Enzymatic Nucleic Acid
aaaaagagggctagctacaacgattgttttc

SEQ ID NO: 2767 - DNA, 31 bp, Artificial Sequence
  Description of Artificial Sequence:  Enzymatic Nucleic Acid
aaaagtaaggctagctacaacgattttaaaa

SEQ ID NO: 2768 - DNA, 31 bp, Artificial Sequence
  Description of Artificial Sequence:  Enzymatic Nucleic Acid
tttaaaagggctagctacaacgaaattttta

SEQ ID NO: 2769 - DNA, 31 bp, Artificial Sequence
  Description of Artificial Sequence:  Enzymatic Nucleic Acid
agttaataggctagctacaacgattaaaagt

SEQ ID NO: 2770 - DNA, 31 bp, Artificial Sequence
  Description of Artificial Sequence:  Enzymatic Nucleic Acid
tgagttaaggctagctacaacgaatttaaaa

SEQ ID NO: 2771 - DNA, 31 bp, Artificial Sequence
  Description of Artificial Sequence:  Enzymatic Nucleic Acid
cttttgagggctagctacaacgataatattt

SEQ ID NO: 2772 - DNA, 31 bp, Artificial Sequence
  Description of Artificial Sequence:  Enzymatic Nucleic Acid
aatctcaaggctagctacaacgattttgagt

SEQ ID NO: 2773 - DNA, 31 bp, Artificial Sequence
  Description of Artificial Sequence:  Enzymatic Nucleic Acid
ccccaaaaggctagctacaacgactcaactt

SEQ ID NO: 2774 - DNA, 31 bp, Artificial Sequence
  Description of Artificial Sequence:  Enzymatic Nucleic Acid
caccaccaggctagctacaacgacccaaaat

SEQ ID NO: 2775 - DNA, 31 bp, Artificial Sequence
  Description of Artificial Sequence:  Enzymatic Nucleic Acid
gcacaccaggctagctacaacgacaccccaa

SEQ ID NO: 2776 - DNA, 31 bp, Artificial Sequence
  Description of Artificial Sequence:  Enzymatic Nucleic Acid
ttggcacaggctagctacaacgacaccaccc

SEQ ID NO: 2777 - DNA, 31 bp, Artificial Sequence
  Description of Artificial Sequence:  Enzymatic Nucleic Acid
tcttggcaggctagctacaacgaaccaccac

SEQ ID NO: 2778 - DNA, 31 bp, Artificial Sequence
  Description of Artificial Sequence:  Enzymatic Nucleic Acid
tgtcttggggctagctacaacgaacaccacc

SEQ ID NO: 2779 - DNA, 31 bp, Artificial Sequence
  Description of Artificial Sequence:  Enzymatic Nucleic Acid
aattaatgggctagctacaacgacttggcac

SEQ ID NO: 2780 - DNA, 31 bp, Artificial Sequence
  Description of Artificial Sequence:  Enzymatic Nucleic Acid
aaaattaaggctagctacaacgagtcttggc

SEQ ID NO: 2781 - DNA, 31 bp, Artificial Sequence
  Description of Artificial Sequence:  Enzymatic Nucleic Acid
aaaaaaaaggctagctacaacgataatgtct

SEQ ID NO: 2782 - DNA, 31 bp, Artificial Sequence
  Description of Artificial Sequence:  Enzymatic Nucleic Acid
cttcattgggctagctacaacgattaaaaaa

SEQ ID NO: 2783 - DNA, 31 bp, Artificial Sequence
  Description of Artificial Sequence:  Enzymatic Nucleic Acid
tcacttcaggctagctacaacgatgtttaaa

SEQ ID NO: 2784 - DNA, 31 bp, Artificial Sequence
  Description of Artificial Sequence:  Enzymatic Nucleic Acid
ctttttcaggctagctacaacgattcattgt

SEQ ID NO: 2785 - DNA, 31 bp, Artificial Sequence
  Description of Artificial Sequence:  Enzymatic Nucleic Acid
ttgtaaaaggctagctacaacgatttttcac

SEQ ID NO: 2786 - DNA, 31 bp, Artificial Sequence
  Description of Artificial Sequence:  Enzymatic Nucleic Acid
agagattgggctagctacaacgaaaaacttt

SEQ ID NO: 2787 - DNA, 31 bp, Artificial Sequence
  Description of Artificial Sequence:  Enzymatic Nucleic Acid
cctagagaggctagctacaacgatgtaaaac

SEQ ID NO: 2788 - DNA, 31 bp, Artificial Sequence
  Description of Artificial Sequence:  Enzymatic Nucleic Acid
tagccaaaggctagctacaacgactagagat

SEQ ID NO: 2789 - DNA, 31 bp, Artificial Sequence
  Description of Artificial Sequence:  Enzymatic Nucleic Acid
agaactagggctagctacaacgacaaaccta

SEQ ID NO: 2790 - DNA, 31 bp, Artificial Sequence
  Description of Artificial Sequence:  Enzymatic Nucleic Acid
taagagaaggctagctacaacgatagccaaa

SEQ ID NO: 2791 - DNA, 31 bp, Artificial Sequence
  Description of Artificial Sequence:  Enzymatic Nucleic Acid
aaccagtgggctagctacaacgataagagaa

SEQ ID NO: 2792 - DNA, 31 bp, Artificial Sequence
  Description of Artificial Sequence:  Enzymatic Nucleic Acid
ttaaccagggctagctacaacgagttaagag

SEQ ID NO: 2793 - DNA, 31 bp, Artificial Sequence
  Description of Artificial Sequence:  Enzymatic Nucleic Acid
taatttaaggctagctacaacgacagtgtta

SEQ ID NO: 2794 - DNA, 31 bp, Artificial Sequence
  Description of Artificial Sequence:  Enzymatic Nucleic Acid
aatgttaaggctagctacaacgattaaccag

SEQ ID NO: 2795 - DNA, 31 bp, Artificial Sequence
  Description of Artificial Sequence:  Enzymatic Nucleic Acid
atgcaatgggctagctacaacgataatttaa

SEQ ID NO: 2796 - DNA, 31 bp, Artificial Sequence
  Description of Artificial Sequence:  Enzymatic Nucleic Acid
ttatgcaaggctagctacaacgagttaattt

SEQ ID NO: 2797 - DNA, 31 bp, Artificial Sequence
  Description of Artificial Sequence:  Enzymatic Nucleic Acid
tgtttatgggctagctacaacgaaatgttaa

SEQ ID NO: 2798 - DNA, 31 bp, Artificial Sequence
  Description of Artificial Sequence:  Enzymatic Nucleic Acid
agtgtttaggctagctacaacgagcaatgtt

SEQ ID NO: 2799 - DNA, 31 bp, Artificial Sequence
  Description of Artificial Sequence:  Enzymatic Nucleic Acid
gaaaagtgggctagctacaacgattatgcaa

SEQ ID NO: 2800 - DNA, 31 bp, Artificial Sequence
  Description of Artificial Sequence:  Enzymatic Nucleic Acid
ttgaaaagggctagctacaacgagtttatgc

SEQ ID NO: 2801 - DNA, 31 bp, Artificial Sequence
  Description of Artificial Sequence:  Enzymatic Nucleic Acid
ggatcagaggctagctacaacgattgaaaag

SEQ ID NO: 2802 - DNA, 31 bp, Artificial Sequence
  Description of Artificial Sequence:  Enzymatic Nucleic Acid
aatatggaggctagctacaacgacagacttg

SEQ ID NO: 2803 - DNA, 31 bp, Artificial Sequence
  Description of Artificial Sequence:  Enzymatic Nucleic Acid
attaaataggctagctacaacgaggatcaga

SEQ ID NO: 2804 - DNA, 31 bp, Artificial Sequence
  Description of Artificial Sequence:  Enzymatic Nucleic Acid
ttattaaaggctagctacaacgaatggatca

SEQ ID NO: 2805 - DNA, 31 bp, Artificial Sequence
  Description of Artificial Sequence:  Enzymatic Nucleic Acid
aagcattaggctagctacaacgataaatatg

SEQ ID NO: 2806 - DNA, 31 bp, Artificial Sequence
  Description of Artificial Sequence:  Enzymatic Nucleic Acid
ttaaagcaggctagctacaacgatattaaat

SEQ ID NO: 2807 - DNA, 31 bp, Artificial Sequence
  Description of Artificial Sequence:  Enzymatic Nucleic Acid
ttttaaagggctagctacaacgaattattaa

SEQ ID NO: 2808 - DNA, 31 bp, Artificial Sequence
  Description of Artificial Sequence:  Enzymatic Nucleic Acid
tatttttaggctagctacaacgatttaaagc

SEQ ID NO: 2809 - DNA, 31 bp, Artificial Sequence
  Description of Artificial Sequence:  Enzymatic Nucleic Acid
tgtttttaggctagctacaacgattttattt

SEQ ID NO: 2810 - DNA, 31 bp, Artificial Sequence
  Description of Artificial Sequence:  Enzymatic Nucleic Acid
aaggattgggctagctacaacgattttattt

SEQ ID NO: 2811 - DNA, 31 bp, Artificial Sequence
  Description of Artificial Sequence:  Enzymatic Nucleic Acid
caaaaggaggctagctacaacgatgttttta

SEQ ID NO: 2812 - DNA, 31 bp, Artificial Sequence
  Description of Artificial Sequence:  Enzymatic Nucleic Acid
taaatttaggctagctacaacgacaaaagga

SEQ ID NO: 2813 - DNA, 31 bp, Artificial Sequence
  Description of Artificial Sequence:  Enzymatic Nucleic Acid
attttaaaggctagctacaacgattatcaaa

SEQ ID NO: 2814 - DNA, 31 bp, Artificial Sequence
  Description of Artificial Sequence:  Enzymatic Nucleic Acid
aagtaacaggctagctacaacgatttaaatt

SEQ ID NO: 2815 - DNA, 31 bp, Artificial Sequence
  Description of Artificial Sequence:  Enzymatic Nucleic Acid
ataagtaaggctagctacaacgaattttaaa

SEQ ID NO: 2816 - DNA, 31 bp, Artificial Sequence
  Description of Artificial Sequence:  Enzymatic Nucleic Acid
aaaataagggctagctacaacgaaacatttt

SEQ ID NO: 2817 - DNA, 31 bp, Artificial Sequence
  Description of Artificial Sequence:  Enzymatic Nucleic Acid
ttttaaaaggctagctacaacgaaagtaaca

SEQ ID NO: 2818 - DNA, 31 bp, Artificial Sequence
  Description of Artificial Sequence:  Enzymatic Nucleic Acid
ttcatttaggctagctacaacgatttaaaat

SEQ ID NO: 2819 - DNA, 31 bp, Artificial Sequence
  Description of Artificial Sequence:  Enzymatic Nucleic Acid
tcacttcaggctagctacaacgattatttta

SEQ ID NO: 2820 - DNA, 31 bp, Artificial Sequence
  Description of Artificial Sequence:  Enzymatic Nucleic Acid
ccatctcaggctagctacaacgattcattta

SEQ ID NO: 2821 - DNA, 31 bp, Artificial Sequence
  Description of Artificial Sequence:  Enzymatic Nucleic Acid
ccatgccaggctagctacaacgactcacttc

SEQ ID NO: 2822 - DNA, 31 bp, Artificial Sequence
  Description of Artificial Sequence:  Enzymatic Nucleic Acid
tcaccatgggctagctacaacgacatctcac

SEQ ID NO: 2823 - DNA, 31 bp, Artificial Sequence
  Description of Artificial Sequence:  Enzymatic Nucleic Acid
cctcaccaggctagctacaacgagccatctc

SEQ ID NO: 2824 - DNA, 31 bp, Artificial Sequence
  Description of Artificial Sequence:  Enzymatic Nucleic Acid
tcacctcaggctagctacaacgacatgccat

SEQ ID NO: 2825 - DNA, 31 bp, Artificial Sequence
  Description of Artificial Sequence:  Enzymatic Nucleic Acid
tactttcaggctagctacaacgactcaccat

SEQ ID NO: 2826 - DNA, 31 bp, Artificial Sequence
  Description of Artificial Sequence:  Enzymatic Nucleic Acid
cagtgataggctagctacaacgatttcacct

SEQ ID NO: 2827 - DNA, 31 bp, Artificial Sequence
  Description of Artificial Sequence:  Enzymatic Nucleic Acid
tccagtgaggctagctacaacgaactttcac

SEQ ID NO: 2828 - DNA, 31 bp, Artificial Sequence
  Description of Artificial Sequence:  Enzymatic Nucleic Acid
tagtccagggctagctacaacgagatacttt

SEQ ID NO: 2829 - DNA, 31 bp, Artificial Sequence
  Description of Artificial Sequence:  Enzymatic Nucleic Acid
caacctagggctagctacaacgaccagtgat

SEQ ID NO: 2830 - DNA, 31 bp, Artificial Sequence
  Description of Artificial Sequence:  Enzymatic Nucleic Acid
accaacaaggctagctacaacgactagtcca

SEQ ID NO: 2831 - DNA, 31 bp, Artificial Sequence
  Description of Artificial Sequence:  Enzymatic Nucleic Acid
gtcaccaaggctagctacaacgaaacctagt

SEQ ID NO: 2832 - DNA, 31 bp, Artificial Sequence
  Description of Artificial Sequence:  Enzymatic Nucleic Acid
ctaagtcaggctagctacaacgacaacaacc

SEQ ID NO: 2833 - DNA, 31 bp, Artificial Sequence
  Description of Artificial Sequence:  Enzymatic Nucleic Acid
aacctaagggctagctacaacgacaccaaca

SEQ ID NO: 2834 - DNA, 31 bp, Artificial Sequence
  Description of Artificial Sequence:  Enzymatic Nucleic Acid
atctagaaggctagctacaacgactaagtca

SEQ ID NO: 2835 - DNA, 31 bp, Artificial Sequence
  Description of Artificial Sequence:  Enzymatic Nucleic Acid
gacacctaggctagctacaacgactagaacc

SEQ ID NO: 2836 - DNA, 31 bp, Artificial Sequence
  Description of Artificial Sequence:  Enzymatic Nucleic Acid
aaaagacaggctagctacaacgactatctag

SEQ ID NO: 2837 - DNA, 31 bp, Artificial Sequence
  Description of Artificial Sequence:  Enzymatic Nucleic Acid
ctaaaagaggctagctacaacgaacctatct

SEQ ID NO: 2838 - DNA, 31 bp, Artificial Sequence
  Description of Artificial Sequence:  Enzymatic Nucleic Acid
aatcagagggctagctacaacgacctaaaag

SEQ ID NO: 2839 - DNA, 31 bp, Artificial Sequence
  Description of Artificial Sequence:  Enzymatic Nucleic Acid
cctcaaaaggctagctacaacgacagagtcc

SEQ ID NO: 2840 - DNA, 31 bp, Artificial Sequence
  Description of Artificial Sequence:  Enzymatic Nucleic Acid
aagtgatgggctagctacaacgacctcaaaa

SEQ ID NO: 2841 - DNA, 31 bp, Artificial Sequence
  Description of Artificial Sequence:  Enzymatic Nucleic Acid
gtaagtgaggctagctacaacgagtcctcaa

SEQ ID NO: 2842 - DNA, 31 bp, Artificial Sequence
  Description of Artificial Sequence:  Enzymatic Nucleic Acid
atagtaagggctagctacaacgagatgtcct

SEQ ID NO: 2843 - DNA, 31 bp, Artificial Sequence
  Description of Artificial Sequence:  Enzymatic Nucleic Acid
atggatagggctagctacaacgaaagtgatg

SEQ ID NO: 2844 - DNA, 31 bp, Artificial Sequence
  Description of Artificial Sequence:  Enzymatic Nucleic Acid
gaaatggaggctagctacaacgaagtaagtg

SEQ ID NO: 2845 - DNA, 31 bp, Artificial Sequence
  Description of Artificial Sequence:  Enzymatic Nucleic Acid
tgaagaaaggctagctacaacgaggatagta

SEQ ID NO: 2846 - DNA, 31 bp, Artificial Sequence
  Description of Artificial Sequence:  Enzymatic Nucleic Acid
ttttaacaggctagctacaacgagaagaaat

SEQ ID NO: 2847 - DNA, 31 bp, Artificial Sequence
  Description of Artificial Sequence:  Enzymatic Nucleic Acid
tcttttaaggctagctacaacgaatgaagaa

SEQ ID NO: 2848 - DNA, 31 bp, Artificial Sequence
  Description of Artificial Sequence:  Enzymatic Nucleic Acid
tgagatgaggctagctacaacgattctttta

SEQ ID NO: 2849 - DNA, 31 bp, Artificial Sequence
  Description of Artificial Sequence:  Enzymatic Nucleic Acid
gtttgagaggctagctacaacgagacttctt

SEQ ID NO: 2850 - DNA, 31 bp, Artificial Sequence
  Description of Artificial Sequence:  Enzymatic Nucleic Acid
actaagagggctagctacaacgattgagatg

SEQ ID NO: 2851 - DNA, 31 bp, Artificial Sequence
  Description of Artificial Sequence:  Enzymatic Nucleic Acid
aaaaaaaaggctagctacaacgataagagtt

SEQ ID NO: 2852 - DNA, 31 bp, Artificial Sequence
  Description of Artificial Sequence:  Enzymatic Nucleic Acid
acatagtgggctagctacaacgaaaaaaaaa

SEQ ID NO: 2853 - DNA, 31 bp, Artificial Sequence
  Description of Artificial Sequence:  Enzymatic Nucleic Acid
tcacatagggctagctacaacgagtaaaaaa

SEQ ID NO: 2854 - DNA, 31 bp, Artificial Sequence
  Description of Artificial Sequence:  Enzymatic Nucleic Acid
aaatcacaggctagctacaacgaagtgtaaa

SEQ ID NO: 2855 - DNA, 31 bp, Artificial Sequence
  Description of Artificial Sequence:  Enzymatic Nucleic Acid
ataaatcaggctagctacaacgaatagtgta

SEQ ID NO: 2856 - DNA, 31 bp, Artificial Sequence
  Description of Artificial Sequence:  Enzymatic Nucleic Acid
aatataaaggctagctacaacgacacatagt

SEQ ID NO: 2857 - DNA, 31 bp, Artificial Sequence
  Description of Artificial Sequence:  Enzymatic Nucleic Acid
atggaataggctagctacaacgaaaatcaca

SEQ ID NO: 2858 - DNA, 31 bp, Artificial Sequence
  Description of Artificial Sequence:  Enzymatic Nucleic Acid
aaatggaaggctagctacaacgaataaatca

SEQ ID NO: 2859 - DNA, 31 bp, Artificial Sequence
  Description of Artificial Sequence:  Enzymatic Nucleic Acid
tatgtaaaggctagctacaacgaggaatata

SEQ ID NO: 2860 - DNA, 31 bp, Artificial Sequence
  Description of Artificial Sequence:  Enzymatic Nucleic Acid
tccttatgggctagctacaacgaaaatggaa

SEQ ID NO: 2861 - DNA, 31 bp, Artificial Sequence
  Description of Artificial Sequence:  Enzymatic Nucleic Acid
tatccttaggctagctacaacgagtaaatgg

SEQ ID NO: 2862 - DNA, 31 bp, Artificial Sequence
  Description of Artificial Sequence:  Enzymatic Nucleic Acid
taagtgtaggctagctacaacgaccttatgt

SEQ ID NO: 2863 - DNA, 31 bp, Artificial Sequence
  Description of Artificial Sequence:  Enzymatic Nucleic Acid
aataagtgggctagctacaacgaatccttat

SEQ ID NO: 2864 - DNA, 31 bp, Artificial Sequence
  Description of Artificial Sequence:  Enzymatic Nucleic Acid
caaataagggctagctacaacgagtatcctt

SEQ ID NO: 2865 - DNA, 31 bp, Artificial Sequence
  Description of Artificial Sequence:  Enzymatic Nucleic Acid
ttgacaaaggctagctacaacgaaagtgtat

SEQ ID NO: 2866 - DNA, 31 bp, Artificial Sequence
  Description of Artificial Sequence:  Enzymatic Nucleic Acid
gagcttgaggctagctacaacgaaaataagt

SEQ ID NO: 2867 - DNA, 31 bp, Artificial Sequence
  Description of Artificial Sequence:  Enzymatic Nucleic Acid
gtgctgagggctagctacaacgattgacaaa

SEQ ID NO: 2868 - DNA, 31 bp, Artificial Sequence
  Description of Artificial Sequence:  Enzymatic Nucleic Acid
agattgtgggctagctacaacgatgagcttg

SEQ ID NO: 2869 - DNA, 31 bp, Artificial Sequence
  Description of Artificial Sequence:  Enzymatic Nucleic Acid
acagattgggctagctacaacgagctgagct

SEQ ID NO: 2870 - DNA, 31 bp, Artificial Sequence
  Description of Artificial Sequence:  Enzymatic Nucleic Acid
tttacagaggctagctacaacgatgtgctga

SEQ ID NO: 2871 - DNA, 31 bp, Artificial Sequence
  Description of Artificial Sequence:  Enzymatic Nucleic Acid
aaaatttaggctagctacaacgaagattgtg

SEQ ID NO: 2872 - DNA, 31 bp, Artificial Sequence
  Description of Artificial Sequence:  Enzymatic Nucleic Acid
gttaaaaaggctagctacaacgattacagat

SEQ ID NO: 2873 - DNA, 31 bp, Artificial Sequence
  Description of Artificial Sequence:  Enzymatic Nucleic Acid
aacataggggctagctacaacgataaaaatt

SEQ ID NO: 2874 - DNA, 31 bp, Artificial Sequence
  Description of Artificial Sequence:  Enzymatic Nucleic Acid
gtgtaacaggctagctacaacgaaggttaaa

SEQ ID NO: 2875 - DNA, 31 bp, Artificial Sequence
  Description of Artificial Sequence:  Enzymatic Nucleic Acid
tggtgtaaggctagctacaacgaataggtta

SEQ ID NO: 2876 - DNA, 31 bp, Artificial Sequence
  Description of Artificial Sequence:  Enzymatic Nucleic Acid
agatggtgggctagctacaacgaaacatagg

SEQ ID NO: 2877 - DNA, 31 bp, Artificial Sequence
  Description of Artificial Sequence:  Enzymatic Nucleic Acid
gaagatggggctagctacaacgagtaacata

SEQ ID NO: 2878 - DNA, 31 bp, Artificial Sequence
  Description of Artificial Sequence:  Enzymatic Nucleic Acid
actgaagaggctagctacaacgaggtgtaac

SEQ ID NO: 2879 - DNA, 31 bp, Artificial Sequence
  Description of Artificial Sequence:  Enzymatic Nucleic Acid
gactggcaggctagctacaacgatgaagatg

SEQ ID NO: 2880 - DNA, 31 bp, Artificial Sequence
  Description of Artificial Sequence:  Enzymatic Nucleic Acid
aagactggggctagctacaacgaactgaaga

SEQ ID NO: 2881 - DNA, 31 bp, Artificial Sequence
  Description of Artificial Sequence:  Enzymatic Nucleic Acid
gcccaagaggctagctacaacgatggcactg

SEQ ID NO: 2882 - DNA, 31 bp, Artificial Sequence
  Description of Artificial Sequence:  Enzymatic Nucleic Acid
caattttgggctagctacaacgaccaagact

SEQ ID NO: 2883 - DNA, 31 bp, Artificial Sequence
  Description of Artificial Sequence:  Enzymatic Nucleic Acid
ttgcacaaggctagctacaacgatttgccca

SEQ ID NO: 2884 - DNA, 31 bp, Artificial Sequence
  Description of Artificial Sequence:  Enzymatic Nucleic Acid
ctcttgcaggctagctacaacgaaattttgc

SEQ ID NO: 2885 - DNA, 31 bp, Artificial Sequence
  Description of Artificial Sequence:  Enzymatic Nucleic Acid
acctcttgggctagctacaacgaacaatttt

SEQ ID NO: 2886 - DNA, 31 bp, Artificial Sequence
  Description of Artificial Sequence:  Enzymatic Nucleic Acid
aaacttcaggctagctacaacgactcttgca

SEQ ID NO: 2887 - DNA, 31 bp, Artificial Sequence
  Description of Artificial Sequence:  Enzymatic Nucleic Acid
aatataaaggctagctacaacgattcacctc

SEQ ID NO: 2888 - DNA, 31 bp, Artificial Sequence
  Description of Artificial Sequence:  Enzymatic Nucleic Acid
ttcaaataggctagctacaacgaaaacttca

SEQ ID NO: 2889 - DNA, 31 bp, Artificial Sequence
  Description of Artificial Sequence:  Enzymatic Nucleic Acid
tattcaaaggctagctacaacgaataaactt

SEQ ID NO: 2890 - DNA, 31 bp, Artificial Sequence
  Description of Artificial Sequence:  Enzymatic Nucleic Acid
aatggataggctagctacaacgatcaaatat

SEQ ID NO: 2891 - DNA, 31 bp, Artificial Sequence
  Description of Artificial Sequence:  Enzymatic Nucleic Acid
agaatggaggctagctacaacgaattcaaat

SEQ ID NO: 2892 - DNA, 31 bp, Artificial Sequence
  Description of Artificial Sequence:  Enzymatic Nucleic Acid
aacgagaaggctagctacaacgaggatattc

SEQ ID NO: 2893 - DNA, 31 bp, Artificial Sequence
  Description of Artificial Sequence:  Enzymatic Nucleic Acid
tcctaaaaggctagctacaacgagagaatgg

SEQ ID NO: 2894 - DNA, 31 bp, Artificial Sequence
  Description of Artificial Sequence:  Enzymatic Nucleic Acid
aagaagagggctagctacaacgacctaaaac

SEQ ID NO: 2895 - DNA, 31 bp, Artificial Sequence
  Description of Artificial Sequence:  Enzymatic Nucleic Acid
cactaataggctagctacaacgaggaagaag

SEQ ID NO: 2896 - DNA, 31 bp, Artificial Sequence
  Description of Artificial Sequence:  Enzymatic Nucleic Acid
gacactaaggctagctacaacgaatggaaga

SEQ ID NO: 2897 - DNA, 31 bp, Artificial Sequence
  Description of Artificial Sequence:  Enzymatic Nucleic Acid
agatgacaggctagctacaacgataatatgg

SEQ ID NO: 2898 - DNA, 31 bp, Artificial Sequence
  Description of Artificial Sequence:  Enzymatic Nucleic Acid
caagatgaggctagctacaacgaactaatat

SEQ ID NO: 2899 - DNA, 31 bp, Artificial Sequence
  Description of Artificial Sequence:  Enzymatic Nucleic Acid
aggcaagaggctagctacaacgagacactaa

SEQ ID NO: 2900 - DNA, 31 bp, Artificial Sequence
  Description of Artificial Sequence:  Enzymatic Nucleic Acid
tagggaggggctagctacaacgaaagatgac

SEQ ID NO: 2901 - DNA, 31 bp, Artificial Sequence
  Description of Artificial Sequence:  Enzymatic Nucleic Acid
gtggaaggggctagctacaacgaagggaggc

SEQ ID NO: 2902 - DNA, 31 bp, Artificial Sequence
  Description of Artificial Sequence:  Enzymatic Nucleic Acid
ggggcatgggctagctacaacgaggaaggta

SEQ ID NO: 2903 - DNA, 31 bp, Artificial Sequence
  Description of Artificial Sequence:  Enzymatic Nucleic Acid
atggggcaggctagctacaacgagtggaagg

SEQ ID NO: 2904 - DNA, 31 bp, Artificial Sequence
  Description of Artificial Sequence:  Enzymatic Nucleic Acid
tcatggggggctagctacaacgaatgtggaa

SEQ ID NO: 2905 - DNA, 31 bp, Artificial Sequence
  Description of Artificial Sequence:  Enzymatic Nucleic Acid
tcaagtcaggctagctacaacgaggggcatg

SEQ ID NO: 2906 - DNA, 31 bp, Artificial Sequence
  Description of Artificial Sequence:  Enzymatic Nucleic Acid
gcatcaagggctagctacaacgacatggggc

SEQ ID NO: 2907 - DNA, 31 bp, Artificial Sequence
  Description of Artificial Sequence:  Enzymatic Nucleic Acid
aaactgcaggctagctacaacgacaagtcat

SEQ ID NO: 2908 - DNA, 31 bp, Artificial Sequence
  Description of Artificial Sequence:  Enzymatic Nucleic Acid
taaaactgggctagctacaacgaatcaagtc

SEQ ID NO: 2909 - DNA, 31 bp, Artificial Sequence
  Description of Artificial Sequence:  Enzymatic Nucleic Acid
tattaaaaggctagctacaacgatgcatcaa

SEQ ID NO: 2910 - DNA, 31 bp, Artificial Sequence
  Description of Artificial Sequence:  Enzymatic Nucleic Acid
tacaagtaggctagctacaacgataaaactg

SEQ ID NO: 2911 - DNA, 31 bp, Artificial Sequence
  Description of Artificial Sequence:  Enzymatic Nucleic Acid
attacaagggctagctacaacgaattaaaac

SEQ ID NO: 2912 - DNA, 31 bp, Artificial Sequence
  Description of Artificial Sequence:  Enzymatic Nucleic Acid
gggaattaggctagctacaacgaaagtatta

SEQ ID NO: 2913 - DNA, 31 bp, Artificial Sequence
  Description of Artificial Sequence:  Enzymatic Nucleic Acid
taggggaaggctagctacaacgatacaagta

SEQ ID NO: 2914 - DNA, 31 bp, Artificial Sequence
  Description of Artificial Sequence:  Enzymatic Nucleic Acid
tcttatggggctagctacaacgataggggaa

SEQ ID NO: 2915 - DNA, 31 bp, Artificial Sequence
  Description of Artificial Sequence:  Enzymatic Nucleic Acid
aaatcttaggctagctacaacgaggttaggg

SEQ ID NO: 2916 - DNA, 31 bp, Artificial Sequence
  Description of Artificial Sequence:  Enzymatic Nucleic Acid
gcagtaaaggctagctacaacgacttatggt

SEQ ID NO: 2917 - DNA, 31 bp, Artificial Sequence
  Description of Artificial Sequence:  Enzymatic Nucleic Acid
agcagcagggctagctacaacgaaaatctta

SEQ ID NO: 2918 - DNA, 31 bp, Artificial Sequence
  Description of Artificial Sequence:  Enzymatic Nucleic Acid
cacagcagggctagctacaacgaagtaaatc

SEQ ID NO: 2919 - DNA, 31 bp, Artificial Sequence
  Description of Artificial Sequence:  Enzymatic Nucleic Acid
atccacagggctagctacaacgaagcagtaa

SEQ ID NO: 2920 - DNA, 31 bp, Artificial Sequence
  Description of Artificial Sequence:  Enzymatic Nucleic Acid
gatatccaggctagctacaacgaagcagcag

SEQ ID NO: 2921 - DNA, 31 bp, Artificial Sequence
  Description of Artificial Sequence:  Enzymatic Nucleic Acid
tggagataggctagctacaacgaccacagca

SEQ ID NO: 2922 - DNA, 31 bp, Artificial Sequence
  Description of Artificial Sequence:  Enzymatic Nucleic Acid
catggagaggctagctacaacgaatccacag

SEQ ID NO: 2923 - DNA, 31 bp, Artificial Sequence
  Description of Artificial Sequence:  Enzymatic Nucleic Acid
aaacttcaggctagctacaacgaggagatat

SEQ ID NO: 2924 - DNA, 31 bp, Artificial Sequence
  Description of Artificial Sequence:  Enzymatic Nucleic Acid
tgggaaaaggctagctacaacgattcatgga

SEQ ID NO: 2925 - DNA, 31 bp, Artificial Sequence
  Description of Artificial Sequence:  Enzymatic Nucleic Acid
tgactcagggctagctacaacgagggaaaac

SEQ ID NO: 2926 - DNA, 31 bp, Artificial Sequence
  Description of Artificial Sequence:  Enzymatic Nucleic Acid
tgatgtgaggctagctacaacgatcagtggg

SEQ ID NO: 2927 - DNA, 31 bp, Artificial Sequence
  Description of Artificial Sequence:  Enzymatic Nucleic Acid
ttctgatgggctagctacaacgagactcagt

SEQ ID NO: 2928 - DNA, 31 bp, Artificial Sequence
  Description of Artificial Sequence:  Enzymatic Nucleic Acid
atttctgaggctagctacaacgagtgactca

SEQ ID NO: 2929 - DNA, 31 bp, Artificial Sequence
  Description of Artificial Sequence:  Enzymatic Nucleic Acid
gtagggcaggctagctacaacgattctgatg

SEQ ID NO: 2930 - DNA, 31 bp, Artificial Sequence
  Description of Artificial Sequence:  Enzymatic Nucleic Acid
atgtagggggctagctacaacgaatttctga

SEQ ID NO: 2931 - DNA, 31 bp, Artificial Sequence
  Description of Artificial Sequence:  Enzymatic Nucleic Acid
ataagatgggctagctacaacgaagggcatt

SEQ ID NO: 2932 - DNA, 31 bp, Artificial Sequence
  Description of Artificial Sequence:  Enzymatic Nucleic Acid
aaataagaggctagctacaacgagtagggca

SEQ ID NO: 2933 - DNA, 31 bp, Artificial Sequence
  Description of Artificial Sequence:  Enzymatic Nucleic Acid
gaggaaaaggctagctacaacgaaagatgta

SEQ ID NO: 2934 - DNA, 31 bp, Artificial Sequence
  Description of Artificial Sequence:  Enzymatic Nucleic Acid
ctcttgagggctagctacaacgacctgagga

SEQ ID NO: 2935 - DNA, 31 bp, Artificial Sequence
  Description of Artificial Sequence:  Enzymatic Nucleic Acid
ctgtcagaggctagctacaacgatctcttga

SEQ ID NO: 2936 - DNA, 31 bp, Artificial Sequence
  Description of Artificial Sequence:  Enzymatic Nucleic Acid
ggtatctgggctagctacaacgacagattct

SEQ ID NO: 2937 - DNA, 31 bp, Artificial Sequence
  Description of Artificial Sequence:  Enzymatic Nucleic Acid
ttatggtaggctagctacaacgactgtcaga

SEQ ID NO: 2938 - DNA, 31 bp, Artificial Sequence
  Description of Artificial Sequence:  Enzymatic Nucleic Acid
ctttatggggctagctacaacgaatctgtca

SEQ ID NO: 2939 - DNA, 31 bp, Artificial Sequence
  Description of Artificial Sequence:  Enzymatic Nucleic Acid
tccctttaggctagctacaacgaggtatctg

SEQ ID NO: 2940 - DNA, 31 bp, Artificial Sequence
  Description of Artificial Sequence:  Enzymatic Nucleic Acid
aggtcaaaggctagctacaacgaccctttat

SEQ ID NO: 2941 - DNA, 31 bp, Artificial Sequence
  Description of Artificial Sequence:  Enzymatic Nucleic Acid
tgattaggggctagctacaacgacaaatccc

SEQ ID NO: 2942 - DNA, 31 bp, Artificial Sequence
  Description of Artificial Sequence:  Enzymatic Nucleic Acid
attagtgaggctagctacaacgataggtcaa

SEQ ID NO: 2943 - DNA, 31 bp, Artificial Sequence
  Description of Artificial Sequence:  Enzymatic Nucleic Acid
aaaattagggctagctacaacgagattaggt

SEQ ID NO: 2944 - DNA, 31 bp, Artificial Sequence
  Description of Artificial Sequence:  Enzymatic Nucleic Acid
cctgaaaaggctagctacaacgatagtgatt

SEQ ID NO: 2945 - DNA, 31 bp, Artificial Sequence
  Description of Artificial Sequence:  Enzymatic Nucleic Acid
agccaccaggctagctacaacgactgaaaat

SEQ ID NO: 2946 - DNA, 31 bp, Artificial Sequence
  Description of Artificial Sequence:  Enzymatic Nucleic Acid
atcagccaggctagctacaacgacacctgaa

SEQ ID NO: 2947 - DNA, 31 bp, Artificial Sequence
  Description of Artificial Sequence:  Enzymatic Nucleic Acid
agcatcagggctagctacaacgacaccacct

SEQ ID NO: 2948 - DNA, 31 bp, Artificial Sequence
  Description of Artificial Sequence:  Enzymatic Nucleic Acid
tcaaagcaggctagctacaacgacagccacc

SEQ ID NO: 2949 - DNA, 31 bp, Artificial Sequence
  Description of Artificial Sequence:  Enzymatic Nucleic Acid
gttcaaagggctagctacaacgaatcagcca

SEQ ID NO: 2950 - DNA, 31 bp, Artificial Sequence
  Description of Artificial Sequence:  Enzymatic Nucleic Acid
aagagatgggctagctacaacgatcaaagca

SEQ ID NO: 2951 - DNA, 31 bp, Artificial Sequence
  Description of Artificial Sequence:  Enzymatic Nucleic Acid
caaagagaggctagctacaacgagttcaaag

SEQ ID NO: 2952 - DNA, 31 bp, Artificial Sequence
  Description of Artificial Sequence:  Enzymatic Nucleic Acid
ttgggcagggctagctacaacgaaaagagat

SEQ ID NO: 2953 - DNA, 31 bp, Artificial Sequence
  Description of Artificial Sequence:  Enzymatic Nucleic Acid
ggattgggggctagctacaacgaagcaaaga

SEQ ID NO: 2954 - DNA, 31 bp, Artificial Sequence
  Description of Artificial Sequence:  Enzymatic Nucleic Acid
ctaatggaggctagctacaacgatgggcagc

SEQ ID NO: 2955 - DNA, 31 bp, Artificial Sequence
  Description of Artificial Sequence:  Enzymatic Nucleic Acid
gtcgctaaggctagctacaacgaggattggg

SEQ ID NO: 2956 - DNA, 31 bp, Artificial Sequence
  Description of Artificial Sequence:  Enzymatic Nucleic Acid
tactgtcgggctagctacaacgataatggat

SEQ ID NO: 2957 - DNA, 31 bp, Artificial Sequence
  Description of Artificial Sequence:  Enzymatic Nucleic Acid
tcctactgggctagctacaacgacgctaatg

SEQ ID NO: 2958 - DNA, 31 bp, Artificial Sequence
  Description of Artificial Sequence:  Enzymatic Nucleic Acid
aaatcctaggctagctacaacgatgtcgcta

SEQ ID NO: 2959 - DNA, 31 bp, Artificial Sequence
  Description of Artificial Sequence:  Enzymatic Nucleic Acid
ttgaaaaaggctagctacaacgacctactgt

SEQ ID NO: 2960 - DNA, 31 bp, Artificial Sequence
  Description of Artificial Sequence:  Enzymatic Nucleic Acid
taccagggggctagctacaacgatgaaaaat

SEQ ID NO: 2961 - DNA, 31 bp, Artificial Sequence
  Description of Artificial Sequence:  Enzymatic Nucleic Acid
tattcataggctagctacaacgacagggttg

SEQ ID NO: 2962 - DNA, 31 bp, Artificial Sequence
  Description of Artificial Sequence:  Enzymatic Nucleic Acid
tctattcaggctagctacaacgaaccagggt

SEQ ID NO: 2963 - DNA, 31 bp, Artificial Sequence
  Description of Artificial Sequence:  Enzymatic Nucleic Acid
tctgtctaggctagctacaacgatcatacca

SEQ ID NO: 2964 - DNA, 31 bp, Artificial Sequence
  Description of Artificial Sequence:  Enzymatic Nucleic Acid
gggttctgggctagctacaacgactattcat

SEQ ID NO: 2965 - DNA, 31 bp, Artificial Sequence
  Description of Artificial Sequence:  Enzymatic Nucleic Acid
ggatagggggctagctacaacgatctgtcta

SEQ ID NO: 2966 - DNA, 31 bp, Artificial Sequence
  Description of Artificial Sequence:  Enzymatic Nucleic Acid
ccactggaggctagctacaacgaagggttct

SEQ ID NO: 2967 - DNA, 31 bp, Artificial Sequence
  Description of Artificial Sequence:  Enzymatic Nucleic Acid
tccttccaggctagctacaacgatggatagg

SEQ ID NO: 2968 - DNA, 31 bp, Artificial Sequence
  Description of Artificial Sequence:  Enzymatic Nucleic Acid
ttattaaaggctagctacaacgatctccttc

SEQ ID NO: 2969 - DNA, 31 bp, Artificial Sequence
  Description of Artificial Sequence:  Enzymatic Nucleic Acid
tatctttaggctagctacaacgataaattct

SEQ ID NO: 2970 - DNA, 31 bp, Artificial Sequence
  Description of Artificial Sequence:  Enzymatic Nucleic Acid
ctgcactaggctagctacaacgactttatta

SEQ ID NO: 2971 - DNA, 31 bp, Artificial Sequence
  Description of Artificial Sequence:  Enzymatic Nucleic Acid
tttctgcaggctagctacaacgatatcttta

SEQ ID NO: 2972 - DNA, 31 bp, Artificial Sequence
  Description of Artificial Sequence:  Enzymatic Nucleic Acid
tctttctgggctagctacaacgaactatctt

SEQ ID NO: 2973 - DNA, 31 bp, Artificial Sequence
  Description of Artificial Sequence:  Enzymatic Nucleic Acid
ctaaggaaggctagctacaacgatctttctg

SEQ ID NO: 2974 - DNA, 31 bp, Artificial Sequence
  Description of Artificial Sequence:  Enzymatic Nucleic Acid
atagattaggctagctacaacgactaaggaa

SEQ ID NO: 2975 - DNA, 31 bp, Artificial Sequence
  Description of Artificial Sequence:  Enzymatic Nucleic Acid
gttatagaggctagctacaacgatacctaag

SEQ ID NO: 2976 - DNA, 31 bp, Artificial Sequence
  Description of Artificial Sequence:  Enzymatic Nucleic Acid
cctagttaggctagctacaacgaagattacc

SEQ ID NO: 2977 - DNA, 31 bp, Artificial Sequence
  Description of Artificial Sequence:  Enzymatic Nucleic Acid
agtcctagggctagctacaacgatatagatt

SEQ ID NO: 2978 - DNA, 31 bp, Artificial Sequence
  Description of Artificial Sequence:  Enzymatic Nucleic Acid
aggagtagggctagctacaacgacctagtta

SEQ ID NO: 2979 - DNA, 31 bp, Artificial Sequence
  Description of Artificial Sequence:  Enzymatic Nucleic Acid
accaggagggctagctacaacgaagtcctag

SEQ ID NO: 2980 - DNA, 31 bp, Artificial Sequence
  Description of Artificial Sequence:  Enzymatic Nucleic Acid
tactgttaggctagctacaacgacaggagta

SEQ ID NO: 2981 - DNA, 31 bp, Artificial Sequence
  Description of Artificial Sequence:  Enzymatic Nucleic Acid
tattactgggctagctacaacgataccagga

SEQ ID NO: 2982 - DNA, 31 bp, Artificial Sequence
  Description of Artificial Sequence:  Enzymatic Nucleic Acid
atgtattaggctagctacaacgatgttacca

SEQ ID NO: 2983 - DNA, 31 bp, Artificial Sequence
  Description of Artificial Sequence:  Enzymatic Nucleic Acid
ggaatgtaggctagctacaacgatactgtta

SEQ ID NO: 2984 - DNA, 31 bp, Artificial Sequence
  Description of Artificial Sequence:  Enzymatic Nucleic Acid
atggaatgggctagctacaacgaattactgt

SEQ ID NO: 2985 - DNA, 31 bp, Artificial Sequence
  Description of Artificial Sequence:  Enzymatic Nucleic Acid
caatggaaggctagctacaacgagtattact

SEQ ID NO: 2986 - DNA, 31 bp, Artificial Sequence
  Description of Artificial Sequence:  Enzymatic Nucleic Acid
taaaacaaggctagctacaacgaggaatgta

SEQ ID NO: 2987 - DNA, 31 bp, Artificial Sequence
  Description of Artificial Sequence:  Enzymatic Nucleic Acid
tactaaaaggctagctacaacgaaatggaat

SEQ ID NO: 2988 - DNA, 31 bp, Artificial Sequence
  Description of Artificial Sequence:  Enzymatic Nucleic Acid
tctggttaggctagctacaacgataaaacaa

SEQ ID NO: 2989 - DNA, 31 bp, Artificial Sequence
  Description of Artificial Sequence:  Enzymatic Nucleic Acid
atttctggggctagctacaacgatactaaaa

SEQ ID NO: 2990 - DNA, 31 bp, Artificial Sequence
  Description of Artificial Sequence:  Enzymatic Nucleic Acid
catgaagaggctagctacaacgattctggtt

SEQ ID NO: 2991 - DNA, 31 bp, Artificial Sequence
  Description of Artificial Sequence:  Enzymatic Nucleic Acid
tcattgcaggctagctacaacgagaagattt

SEQ ID NO: 2992 - DNA, 31 bp, Artificial Sequence
  Description of Artificial Sequence:  Enzymatic Nucleic Acid
tttcattgggctagctacaacgaatgaagat

SEQ ID NO: 2993 - DNA, 31 bp, Artificial Sequence
  Description of Artificial Sequence:  Enzymatic Nucleic Acid
atttttcaggctagctacaacgatgcatgaa

SEQ ID NO: 2994 - DNA, 31 bp, Artificial Sequence
  Description of Artificial Sequence:  Enzymatic Nucleic Acid
ttaaagtaggctagctacaacgattttcatt

SEQ ID NO: 2995 - DNA, 31 bp, Artificial Sequence
  Description of Artificial Sequence:  Enzymatic Nucleic Acid
aattaaagggctagctacaacgaatttttca

SEQ ID NO: 2996 - DNA, 31 bp, Artificial Sequence
  Description of Artificial Sequence:  Enzymatic Nucleic Acid
ttcatgaaggctagctacaacgataaagtat

SEQ ID NO: 2997 - DNA, 31 bp, Artificial Sequence
  Description of Artificial Sequence:  Enzymatic Nucleic Acid
aagcttcaggctagctacaacgagaattaaa

SEQ ID NO: 2998 - DNA, 31 bp, Artificial Sequence
  Description of Artificial Sequence:  Enzymatic Nucleic Acid
aaagtaagggctagctacaacgattcatgaa

SEQ ID NO: 2999 - DNA, 31 bp, Artificial Sequence
  Description of Artificial Sequence:  Enzymatic Nucleic Acid
aaaaaaagggctagctacaacgaaagcttca

SEQ ID NO: 3000 - DNA, 31 bp, Artificial Sequence
  Description of Artificial Sequence:  Enzymatic Nucleic Acid
ctctgacaggctagctacaacgacaaaaaaa

SEQ ID NO: 3001 - DNA, 31 bp, Artificial Sequence
  Description of Artificial Sequence:  Enzymatic Nucleic Acid
gactctgaggctagctacaacgaaccaaaaa

SEQ ID NO: 3002 - DNA, 31 bp, Artificial Sequence
  Description of Artificial Sequence:  Enzymatic Nucleic Acid
gagcgagaggctagctacaacgatctgacac

SEQ ID NO: 3003 - DNA, 31 bp, Artificial Sequence
  Description of Artificial Sequence:  Enzymatic Nucleic Acid
gacaagagggctagctacaacgagagactct

SEQ ID NO: 3004 - DNA, 31 bp, Artificial Sequence
  Description of Artificial Sequence:  Enzymatic Nucleic Acid
ctgggtgaggctagctacaacgaaagagcga

SEQ ID NO: 3005 - DNA, 31 bp, Artificial Sequence
  Description of Artificial Sequence:  Enzymatic Nucleic Acid
agcctgggggctagctacaacgagacaagag

SEQ ID NO: 3006 - DNA, 31 bp, Artificial Sequence
  Description of Artificial Sequence:  Enzymatic Nucleic Acid
cattccagggctagctacaacgactgggtga

SEQ ID NO: 3007 - DNA, 31 bp, Artificial Sequence
  Description of Artificial Sequence:  Enzymatic Nucleic Acid
ccactgcaggctagctacaacgatccagcct

SEQ ID NO: 3008 - DNA, 31 bp, Artificial Sequence
  Description of Artificial Sequence:  Enzymatic Nucleic Acid
cgccactgggctagctacaacgaattccagc

SEQ ID NO: 3009 - DNA, 31 bp, Artificial Sequence
  Description of Artificial Sequence:  Enzymatic Nucleic Acid
tggcgccaggctagctacaacgatgcattcc

SEQ ID NO: 3010 - DNA, 31 bp, Artificial Sequence
  Description of Artificial Sequence:  Enzymatic Nucleic Acid
agatggcgggctagctacaacgacactgcat

SEQ ID NO: 3011 - DNA, 31 bp, Artificial Sequence
  Description of Artificial Sequence:  Enzymatic Nucleic Acid
tgagatggggctagctacaacgagccactgc

SEQ ID NO: 3012 - DNA, 31 bp, Artificial Sequence
  Description of Artificial Sequence:  Enzymatic Nucleic Acid
agctgagaggctagctacaacgaggcgccac

SEQ ID NO: 3013 - DNA, 31 bp, Artificial Sequence
  Description of Artificial Sequence:  Enzymatic Nucleic Acid
gcagtgagggctagctacaacgatgagatgg

SEQ ID NO: 3014 - DNA, 31 bp, Artificial Sequence
  Description of Artificial Sequence:  Enzymatic Nucleic Acid
ggttgcagggctagctacaacgagagctgag

SEQ ID NO: 3015 - DNA, 31 bp, Artificial Sequence
  Description of Artificial Sequence:  Enzymatic Nucleic Acid
gaaggttgggctagctacaacgaagtgagct

SEQ ID NO: 3016 - DNA, 31 bp, Artificial Sequence
  Description of Artificial Sequence:  Enzymatic Nucleic Acid
atggaaggggctagctacaacgatgcagtga

SEQ ID NO: 3017 - DNA, 31 bp, Artificial Sequence
  Description of Artificial Sequence:  Enzymatic Nucleic Acid
tgggaagaggctagctacaacgaggaaggtt

SEQ ID NO: 3018 - DNA, 31 bp, Artificial Sequence
  Description of Artificial Sequence:  Enzymatic Nucleic Acid
cgcttgaaggctagctacaacgactgggaag

SEQ ID NO: 3019 - DNA, 31 bp, Artificial Sequence
  Description of Artificial Sequence:  Enzymatic Nucleic Acid
gagaatcgggctagctacaacgattgaacct

SEQ ID NO: 3020 - DNA, 31 bp, Artificial Sequence
  Description of Artificial Sequence:  Enzymatic Nucleic Acid
cacgagaaggctagctacaacgacgcttgaa

SEQ ID NO: 3021 - DNA, 31 bp, Artificial Sequence
  Description of Artificial Sequence:  Enzymatic Nucleic Acid
ccgaggcaggctagctacaacgagagaatcg

SEQ ID NO: 3022 - DNA, 31 bp, Artificial Sequence
  Description of Artificial Sequence:  Enzymatic Nucleic Acid
ggccgaggggctagctacaacgaacgagaat

SEQ ID NO: 3023 - DNA, 31 bp, Artificial Sequence
  Description of Artificial Sequence:  Enzymatic Nucleic Acid
tcaggaggggctagctacaacgacgaggcac

SEQ ID NO: 3024 - DNA, 31 bp, Artificial Sequence
  Description of Artificial Sequence:  Enzymatic Nucleic Acid
cccagctaggctagctacaacgatcaggagg

SEQ ID NO: 3025 - DNA, 31 bp, Artificial Sequence
  Description of Artificial Sequence:  Enzymatic Nucleic Acid
aatcccagggctagctacaacgatactcagg

SEQ ID NO: 3026 - DNA, 31 bp, Artificial Sequence
  Description of Artificial Sequence:  Enzymatic Nucleic Acid
gcctgtaaggctagctacaacgacccagcta

SEQ ID NO: 3027 - DNA, 31 bp, Artificial Sequence
  Description of Artificial Sequence:  Enzymatic Nucleic Acid
cacgcctgggctagctacaacgaaatcccag

SEQ ID NO: 3028 - DNA, 31 bp, Artificial Sequence
  Description of Artificial Sequence:  Enzymatic Nucleic Acid
tgcacacgggctagctacaacgactgtaatc

SEQ ID NO: 3029 - DNA, 31 bp, Artificial Sequence
  Description of Artificial Sequence:  Enzymatic Nucleic Acid
agtgcacaggctagctacaacgagcctgtaa

SEQ ID NO: 3030 - DNA, 31 bp, Artificial Sequence
  Description of Artificial Sequence:  Enzymatic Nucleic Acid
gtagtgcaggctagctacaacgaacgcctgt

SEQ ID NO: 3031 - DNA, 31 bp, Artificial Sequence
  Description of Artificial Sequence:  Enzymatic Nucleic Acid
gtgtagtgggctagctacaacgaacacgcct

SEQ ID NO: 3032 - DNA, 31 bp, Artificial Sequence
  Description of Artificial Sequence:  Enzymatic Nucleic Acid
gagtgtagggctagctacaacgagcacacgc

SEQ ID NO: 3033 - DNA, 31 bp, Artificial Sequence
  Description of Artificial Sequence:  Enzymatic Nucleic Acid
gttgagtgggctagctacaacgaagtgcaca

SEQ ID NO: 3034 - DNA, 31 bp, Artificial Sequence
  Description of Artificial Sequence:  Enzymatic Nucleic Acid
tagttgagggctagctacaacgagtagtgca

SEQ ID NO: 3035 - DNA, 31 bp, Artificial Sequence
  Description of Artificial Sequence:  Enzymatic Nucleic Acid
aaaattagggctagctacaacgatgagtgta

SEQ ID NO: 3036 - DNA, 31 bp, Artificial Sequence
  Description of Artificial Sequence:  Enzymatic Nucleic Acid
tacaaaaaggctagctacaacgatagttgag

SEQ ID NO: 3037 - DNA, 31 bp, Artificial Sequence
  Description of Artificial Sequence:  Enzymatic Nucleic Acid
taaaaataggctagctacaacgaaaaaatta

SEQ ID NO: 3038 - DNA, 31 bp, Artificial Sequence
  Description of Artificial Sequence:  Enzymatic Nucleic Acid
cctaaaaaggctagctacaacgaacaaaaat

SEQ ID NO: 3039 - DNA, 31 bp, Artificial Sequence
  Description of Artificial Sequence:  Enzymatic Nucleic Acid
aaaccccgggctagctacaacgactctccta

SEQ ID NO: 3040 - DNA, 31 bp, Artificial Sequence
  Description of Artificial Sequence:  Enzymatic Nucleic Acid
aggtgaaaggctagctacaacgacccgtctc

SEQ ID NO: 3041 - DNA, 31 bp, Artificial Sequence
  Description of Artificial Sequence:  Enzymatic Nucleic Acid
ccaacaggggctagctacaacgagaaacccc

SEQ ID NO: 3042 - DNA, 31 bp, Artificial Sequence
  Description of Artificial Sequence:  Enzymatic Nucleic Acid
ctggccaaggctagctacaacgaaggtgaaa

SEQ ID NO: 3043 - DNA, 31 bp, Artificial Sequence
  Description of Artificial Sequence:  Enzymatic Nucleic Acid
cagcctggggctagctacaacgacaacaggt

SEQ ID NO: 3044 - DNA, 31 bp, Artificial Sequence
  Description of Artificial Sequence:  Enzymatic Nucleic Acid
gagaccagggctagctacaacgactggccaa

SEQ ID NO: 3045 - DNA, 31 bp, Artificial Sequence
  Description of Artificial Sequence:  Enzymatic Nucleic Acid
gttcgagaggctagctacaacgacagcctgg

SEQ ID NO: 3046 - DNA, 31 bp, Artificial Sequence
  Description of Artificial Sequence:  Enzymatic Nucleic Acid
gtcaggagggctagctacaacgatcgagacc

SEQ ID NO: 3047 - DNA, 31 bp, Artificial Sequence
  Description of Artificial Sequence:  Enzymatic Nucleic Acid
acttgaggggctagctacaacgacaggagtt

SEQ ID NO: 3048 - DNA, 31 bp, Artificial Sequence
  Description of Artificial Sequence:  Enzymatic Nucleic Acid
gtgaatcaggctagctacaacgattgaggtc

SEQ ID NO: 3049 - DNA, 31 bp, Artificial Sequence
  Description of Artificial Sequence:  Enzymatic Nucleic Acid
tgggtgaaggctagctacaacgacacttgag

SEQ ID NO: 3050 - DNA, 31 bp, Artificial Sequence
  Description of Artificial Sequence:  Enzymatic Nucleic Acid
aaggtgggggctagctacaacgagaatcact

SEQ ID NO: 3051 - DNA, 31 bp, Artificial Sequence
  Description of Artificial Sequence:  Enzymatic Nucleic Acid
ggccaaggggctagctacaacgagggtgaat

SEQ ID NO: 3052 - DNA, 31 bp, Artificial Sequence
  Description of Artificial Sequence:  Enzymatic Nucleic Acid
ttatgaggggctagctacaacgacaaggtgg

SEQ ID NO: 3053 - DNA, 31 bp, Artificial Sequence
  Description of Artificial Sequence:  Enzymatic Nucleic Acid
caggtttaggctagctacaacgagaggccaa

SEQ ID NO: 3054 - DNA, 31 bp, Artificial Sequence
  Description of Artificial Sequence:  Enzymatic Nucleic Acid
aaaacaggggctagctacaacgattatgagg

SEQ ID NO: 3055 - DNA, 31 bp, Artificial Sequence
  Description of Artificial Sequence:  Enzymatic Nucleic Acid
ctgcaaaaggctagctacaacgaaggtttat

SEQ ID NO: 3056 - DNA, 31 bp, Artificial Sequence
  Description of Artificial Sequence:  Enzymatic Nucleic Acid
gagttctgggctagctacaacgaaaaacagg

SEQ ID NO: 3057 - DNA, 31 bp, Artificial Sequence
  Description of Artificial Sequence:  Enzymatic Nucleic Acid
taaatgagggctagctacaacgatctgcaaa

SEQ ID NO: 3058 - DNA, 31 bp, Artificial Sequence
  Description of Artificial Sequence:  Enzymatic Nucleic Acid
tgaataaaggctagctacaacgagagttctg

SEQ ID NO: 3059 - DNA, 31 bp, Artificial Sequence
  Description of Artificial Sequence:  Enzymatic Nucleic Acid
ttgctgaaggctagctacaacgaaaatgagt

SEQ ID NO: 3060 - DNA, 31 bp, Artificial Sequence
  Description of Artificial Sequence:  Enzymatic Nucleic Acid
aatatttgggctagctacaacgatgaataaa

SEQ ID NO: 3061 - DNA, 31 bp, Artificial Sequence
  Description of Artificial Sequence:  Enzymatic Nucleic Acid
aataaataggctagctacaacgattgctgaa

SEQ ID NO: 3062 - DNA, 31 bp, Artificial Sequence
  Description of Artificial Sequence:  Enzymatic Nucleic Acid
tcaataaaggctagctacaacgaatttgctg

SEQ ID NO: 3063 - DNA, 31 bp, Artificial Sequence
  Description of Artificial Sequence:  Enzymatic Nucleic Acid
gcactcaaggctagctacaacgaaaatattt

SEQ ID NO: 3064 - DNA, 31 bp, Artificial Sequence
  Description of Artificial Sequence:  Enzymatic Nucleic Acid
ggtaggcaggctagctacaacgatcaataaa

SEQ ID NO: 3065 - DNA, 31 bp, Artificial Sequence
  Description of Artificial Sequence:  Enzymatic Nucleic Acid
ctggtaggggctagctacaacgaactcaata

SEQ ID NO: 3066 - DNA, 31 bp, Artificial Sequence
  Description of Artificial Sequence:  Enzymatic Nucleic Acid
gcatctggggctagctacaacgaaggcactc

SEQ ID NO: 3067 - DNA, 31 bp, Artificial Sequence
  Description of Artificial Sequence:  Enzymatic Nucleic Acid
gactggcaggctagctacaacgactggtagg

SEQ ID NO: 3068 - DNA, 31 bp, Artificial Sequence
  Description of Artificial Sequence:  Enzymatic Nucleic Acid
gtgactggggctagctacaacgaatctggta

SEQ ID NO: 3069 - DNA, 31 bp, Artificial Sequence
  Description of Artificial Sequence:  Enzymatic Nucleic Acid
tgcggtgaggctagctacaacgatggcatct

SEQ ID NO: 3070 - DNA, 31 bp, Artificial Sequence
  Description of Artificial Sequence:  Enzymatic Nucleic Acid
ttgtgcggggctagctacaacgagactggca

SEQ ID NO: 3071 - DNA, 31 bp, Artificial Sequence
  Description of Artificial Sequence:  Enzymatic Nucleic Acid
gccttgtgggctagctacaacgaggtgactg

SEQ ID NO: 3072 - DNA, 31 bp, Artificial Sequence
  Description of Artificial Sequence:  Enzymatic Nucleic Acid
gtgccttgggctagctacaacgagcggtgac

SEQ ID NO: 3073 - DNA, 31 bp, Artificial Sequence
  Description of Artificial Sequence:  Enzymatic Nucleic Acid
acccagtgggctagctacaacgacttgtgcg

SEQ ID NO: 3074 - DNA, 31 bp, Artificial Sequence
  Description of Artificial Sequence:  Enzymatic Nucleic Acid
atacccagggctagctacaacgagccttgtg

SEQ ID NO: 3075 - DNA, 31 bp, Artificial Sequence
  Description of Artificial Sequence:  Enzymatic Nucleic Acid
accatataggctagctacaacgaccagtgcc

SEQ ID NO: 3076 - DNA, 31 bp, Artificial Sequence
  Description of Artificial Sequence:  Enzymatic Nucleic Acid
ataccataggctagctacaacgaacccagtg

SEQ ID NO: 3077 - DNA, 31 bp, Artificial Sequence
  Description of Artificial Sequence:  Enzymatic Nucleic Acid
ggataccaggctagctacaacgaatacccag

SEQ ID NO: 3078 - DNA, 31 bp, Artificial Sequence
  Description of Artificial Sequence:  Enzymatic Nucleic Acid
tggggataggctagctacaacgacatatacc

SEQ ID NO: 3079 - DNA, 31 bp, Artificial Sequence
  Description of Artificial Sequence:  Enzymatic Nucleic Acid
tttggggaggctagctacaacgaaccatata

SEQ ID NO: 3080 - DNA, 31 bp, Artificial Sequence
  Description of Artificial Sequence:  Enzymatic Nucleic Acid
gtctcttgggctagctacaacgattggggat

SEQ ID NO: 3081 - DNA, 31 bp, Artificial Sequence
  Description of Artificial Sequence:  Enzymatic Nucleic Acid
ggattatgggctagctacaacgactcttgtt

SEQ ID NO: 3082 - DNA, 31 bp, Artificial Sequence
  Description of Artificial Sequence:  Enzymatic Nucleic Acid
cgggattaggctagctacaacgagtctcttg

SEQ ID NO: 3083 - DNA, 31 bp, Artificial Sequence
  Description of Artificial Sequence:  Enzymatic Nucleic Acid
gaccgggaggctagctacaacgatatgtctc

SEQ ID NO: 3084 - DNA, 31 bp, Artificial Sequence
  Description of Artificial Sequence:  Enzymatic Nucleic Acid
cctaaggaggctagctacaacgacgggatta

SEQ ID NO: 3085 - DNA, 31 bp, Artificial Sequence
  Description of Artificial Sequence:  Enzymatic Nucleic Acid
tagcagtaggctagctacaacgactaaggac

SEQ ID NO: 3086 - DNA, 31 bp, Artificial Sequence
  Description of Artificial Sequence:  Enzymatic Nucleic Acid
actagcagggctagctacaacgaacctaagg

SEQ ID NO: 3087 - DNA, 31 bp, Artificial Sequence
  Description of Artificial Sequence:  Enzymatic Nucleic Acid
cacactagggctagctacaacgaagtaccta

SEQ ID NO: 3088 - DNA, 31 bp, Artificial Sequence
  Description of Artificial Sequence:  Enzymatic Nucleic Acid
agaccacaggctagctacaacgatagcagta

SEQ ID NO: 3089 - DNA, 31 bp, Artificial Sequence
  Description of Artificial Sequence:  Enzymatic Nucleic Acid
acagaccaggctagctacaacgaactagcag

SEQ ID NO: 3090 - DNA, 31 bp, Artificial Sequence
  Description of Artificial Sequence:  Enzymatic Nucleic Acid
attacagaggctagctacaacgacacactag

SEQ ID NO: 3091 - DNA, 31 bp, Artificial Sequence
  Description of Artificial Sequence:  Enzymatic Nucleic Acid
agatattaggctagctacaacgaagaccaca

SEQ ID NO: 3092 - DNA, 31 bp, Artificial Sequence
  Description of Artificial Sequence:  Enzymatic Nucleic Acid
gtaagataggctagctacaacgatacagacc

SEQ ID NO: 3093 - DNA, 31 bp, Artificial Sequence
  Description of Artificial Sequence:  Enzymatic Nucleic Acid
tagtaagaggctagctacaacgaattacaga

SEQ ID NO: 3094 - DNA, 31 bp, Artificial Sequence
  Description of Artificial Sequence:  Enzymatic Nucleic Acid
ggccttagggctagctacaacgaaagatatt

SEQ ID NO: 3095 - DNA, 31 bp, Artificial Sequence
  Description of Artificial Sequence:  Enzymatic Nucleic Acid
accaaaggggctagctacaacgacttagtaa

SEQ ID NO: 3096 - DNA, 31 bp, Artificial Sequence
  Description of Artificial Sequence:  Enzymatic Nucleic Acid
gtcgtataggctagctacaacgacaaaggcc

SEQ ID NO: 3097 - DNA, 31 bp, Artificial Sequence
  Description of Artificial Sequence:  Enzymatic Nucleic Acid
gggtcgtaggctagctacaacgaaccaaagg

SEQ ID NO: 3098 - DNA, 31 bp, Artificial Sequence
  Description of Artificial Sequence:  Enzymatic Nucleic Acid
ctgggtcgggctagctacaacgaataccaaa

SEQ ID NO: 3099 - DNA, 31 bp, Artificial Sequence
  Description of Artificial Sequence:  Enzymatic Nucleic Acid
tctctgggggctagctacaacgacgtatacc

SEQ ID NO: 3100 - DNA, 31 bp, Artificial Sequence
  Description of Artificial Sequence:  Enzymatic Nucleic Acid
tcgtgttaggctagctacaacgactctgggt

SEQ ID NO: 3101 - DNA, 31 bp, Artificial Sequence
  Description of Artificial Sequence:  Enzymatic Nucleic Acid
gcatcgtgggctagctacaacgatatctctg

SEQ ID NO: 3102 - DNA, 31 bp, Artificial Sequence
  Description of Artificial Sequence:  Enzymatic Nucleic Acid
acgcatcgggctagctacaacgagttatctc

SEQ ID NO: 3103 - DNA, 31 bp, Artificial Sequence
  Description of Artificial Sequence:  Enzymatic Nucleic Acid
aatacgcaggctagctacaacgacgtgttat

SEQ ID NO: 3104 - DNA, 31 bp, Artificial Sequence
  Description of Artificial Sequence:  Enzymatic Nucleic Acid
aaaatacgggctagctacaacgaatcgtgtt

SEQ ID NO: 3105 - DNA, 31 bp, Artificial Sequence
  Description of Artificial Sequence:  Enzymatic Nucleic Acid
ctaaaataggctagctacaacgagcatcgtg

SEQ ID NO: 3106 - DNA, 31 bp, Artificial Sequence
  Description of Artificial Sequence:  Enzymatic Nucleic Acid
aactaaaaggctagctacaacgaacgcatcg

SEQ ID NO: 3107 - DNA, 31 bp, Artificial Sequence
  Description of Artificial Sequence:  Enzymatic Nucleic Acid
ttgcaaaaggctagctacaacgataaaatac

SEQ ID NO: 3108 - DNA, 31 bp, Artificial Sequence
  Description of Artificial Sequence:  Enzymatic Nucleic Acid
cttctttgggctagctacaacgaaaaactaa

SEQ ID NO: 3109 - DNA, 31 bp, Artificial Sequence
  Description of Artificial Sequence:  Enzymatic Nucleic Acid
agaccaaaggctagctacaacgacccttctt

SEQ ID NO: 3110 - DNA, 31 bp, Artificial Sequence
  Description of Artificial Sequence:  Enzymatic Nucleic Acid
cacagagaggctagctacaacgacaaacccc

SEQ ID NO: 3111 - DNA, 31 bp, Artificial Sequence
  Description of Artificial Sequence:  Enzymatic Nucleic Acid
agctggcaggctagctacaacgaagagacca

SEQ ID NO: 3112 - DNA, 31 bp, Artificial Sequence
  Description of Artificial Sequence:  Enzymatic Nucleic Acid
agagctggggctagctacaacgaacagagac

SEQ ID NO: 3113 - DNA, 31 bp, Artificial Sequence
  Description of Artificial Sequence:  Enzymatic Nucleic Acid
ttatagagggctagctacaacgatggcacag

SEQ ID NO: 3114 - DNA, 31 bp, Artificial Sequence
  Description of Artificial Sequence:  Enzymatic Nucleic Acid
aacaattaggctagctacaacgaagagctgg

SEQ ID NO: 3115 - DNA, 31 bp, Artificial Sequence
  Description of Artificial Sequence:  Enzymatic Nucleic Acid
caaaacaaggctagctacaacgatatagagc

SEQ ID NO: 3116 - DNA, 31 bp, Artificial Sequence
  Description of Artificial Sequence:  Enzymatic Nucleic Acid
tagcaaaaggctagctacaacgaaattatag

SEQ ID NO: 3117 - DNA, 31 bp, Artificial Sequence
  Description of Artificial Sequence:  Enzymatic Nucleic Acid
aatcgtagggctagctacaacgaaaaacaat

SEQ ID NO: 3118 - DNA, 31 bp, Artificial Sequence
  Description of Artificial Sequence:  Enzymatic Nucleic Acid
tggaatcgggctagctacaacgaagcaaaac

SEQ ID NO: 3119 - DNA, 31 bp, Artificial Sequence
  Description of Artificial Sequence:  Enzymatic Nucleic Acid
cagtggaaggctagctacaacgacgtagcaa

SEQ ID NO: 3120 - DNA, 31 bp, Artificial Sequence
  Description of Artificial Sequence:  Enzymatic Nucleic Acid
agtttcagggctagctacaacgaggaatcgt

SEQ ID NO: 3121 - DNA, 31 bp, Artificial Sequence
  Description of Artificial Sequence:  Enzymatic Nucleic Acid
tcgaagagggctagctacaacgattcagtgg

SEQ ID NO: 3122 - DNA, 31 bp, Artificial Sequence
  Description of Artificial Sequence:  Enzymatic Nucleic Acid
tagcttgaggctagctacaacgacgaagagt

SEQ ID NO: 3123 - DNA, 31 bp, Artificial Sequence
  Description of Artificial Sequence:  Enzymatic Nucleic Acid
taaagtagggctagctacaacgattgatcga

SEQ ID NO: 3124 - DNA, 31 bp, Artificial Sequence
  Description of Artificial Sequence:  Enzymatic Nucleic Acid
acataaagggctagctacaacgaagcttgat

SEQ ID NO: 3125 - DNA, 31 bp, Artificial Sequence
  Description of Artificial Sequence:  Enzymatic Nucleic Acid
gatttacaggctagctacaacgaaaagtagc

SEQ ID NO: 3126 - DNA, 31 bp, Artificial Sequence
  Description of Artificial Sequence:  Enzymatic Nucleic Acid
gtgatttaggctagctacaacgaataaagta

SEQ ID NO: 3127 - DNA, 31 bp, Artificial Sequence
  Description of Artificial Sequence:  Enzymatic Nucleic Acid
tgaagtgaggctagctacaacgattacataa

SEQ ID NO: 3128 - DNA, 31 bp, Artificial Sequence
  Description of Artificial Sequence:  Enzymatic Nucleic Acid
caatgaagggctagctacaacgagatttaca

SEQ ID NO: 3129 - DNA, 31 bp, Artificial Sequence
  Description of Artificial Sequence:  Enzymatic Nucleic Acid
taaaacaaggctagctacaacgagaagtgat

SEQ ID NO: 3130 - DNA, 31 bp, Artificial Sequence
  Description of Artificial Sequence:  Enzymatic Nucleic Acid
ctttaaaaggctagctacaacgaaatgaagt

SEQ ID NO: 3131 - DNA, 31 bp, Artificial Sequence
  Description of Artificial Sequence:  Enzymatic Nucleic Acid
caagtttaggctagctacaacgatcctttaa

SEQ ID NO: 3132 - DNA, 31 bp, Artificial Sequence
  Description of Artificial Sequence:  Enzymatic Nucleic Acid
taatcaagggctagctacaacgattattcct

SEQ ID NO: 3133 - DNA, 31 bp, Artificial Sequence
  Description of Artificial Sequence:  Enzymatic Nucleic Acid
caatataaggctagctacaacgacaagttta

SEQ ID NO: 3134 - DNA, 31 bp, Artificial Sequence
  Description of Artificial Sequence:  Enzymatic Nucleic Acid
aaacaataggctagctacaacgaaatcaagt

SEQ ID NO: 3135 - DNA, 31 bp, Artificial Sequence
  Description of Artificial Sequence:  Enzymatic Nucleic Acid
aaaaacaaggctagctacaacgaataatcaa

SEQ ID NO: 3136 - DNA, 31 bp, Artificial Sequence
  Description of Artificial Sequence:  Enzymatic Nucleic Acid
taaaaaaaggctagctacaacgaaatataat

SEQ ID NO: 3137 - DNA, 31 bp, Artificial Sequence
  Description of Artificial Sequence:  Enzymatic Nucleic Acid
atgccaaaggctagctacaacgaaaaaaaac

SEQ ID NO: 3138 - DNA, 31 bp, Artificial Sequence
  Description of Artificial Sequence:  Enzymatic Nucleic Acid
cagttatgggctagctacaacgacaaataaa

SEQ ID NO: 3139 - DNA, 31 bp, Artificial Sequence
  Description of Artificial Sequence:  Enzymatic Nucleic Acid
cacagttaggctagctacaacgagccaaata

SEQ ID NO: 3140 - DNA, 31 bp, Artificial Sequence
  Description of Artificial Sequence:  Enzymatic Nucleic Acid
aatcacagggctagctacaacgatatgccaa

SEQ ID NO: 3141 - DNA, 31 bp, Artificial Sequence
  Description of Artificial Sequence:  Enzymatic Nucleic Acid
aagaatcaggctagctacaacgaagttatgc

SEQ ID NO: 3142 - DNA, 31 bp, Artificial Sequence
  Description of Artificial Sequence:  Enzymatic Nucleic Acid
taaaagaaggctagctacaacgacacagtta

SEQ ID NO: 3143 - DNA, 31 bp, Artificial Sequence
  Description of Artificial Sequence:  Enzymatic Nucleic Acid
agtaattgggctagctacaacgacctaaaag

SEQ ID NO: 3144 - DNA, 31 bp, Artificial Sequence
  Description of Artificial Sequence:  Enzymatic Nucleic Acid
tacagtaaggctagctacaacgatgtcctaa

SEQ ID NO: 3145 - DNA, 31 bp, Artificial Sequence
  Description of Artificial Sequence:  Enzymatic Nucleic Acid
gtgtacagggctagctacaacgaaattgtcc

SEQ ID NO: 3146 - DNA, 31 bp, Artificial Sequence
  Description of Artificial Sequence:  Enzymatic Nucleic Acid
aatgtgtaggctagctacaacgaagtaattg

SEQ ID NO: 3147 - DNA, 31 bp, Artificial Sequence
  Description of Artificial Sequence:  Enzymatic Nucleic Acid
ttaatgtgggctagctacaacgaacagtaat

SEQ ID NO: 3148 - DNA, 31 bp, Artificial Sequence
  Description of Artificial Sequence:  Enzymatic Nucleic Acid
ccttaatgggctagctacaacgagtacagta

SEQ ID NO: 3149 - DNA, 31 bp, Artificial Sequence
  Description of Artificial Sequence:  Enzymatic Nucleic Acid
caccttaaggctagctacaacgagtgtacag

SEQ ID NO: 3150 - DNA, 31 bp, Artificial Sequence
  Description of Artificial Sequence:  Enzymatic Nucleic Acid
gacatacaggctagctacaacgacttaatgt

SEQ ID NO: 3151 - DNA, 31 bp, Artificial Sequence
  Description of Artificial Sequence:  Enzymatic Nucleic Acid
ctgacataggctagctacaacgaaccttaat

SEQ ID NO: 3152 - DNA, 31 bp, Artificial Sequence
  Description of Artificial Sequence:  Enzymatic Nucleic Acid
atctgacaggctagctacaacgaacacctta

SEQ ID NO: 3153 - DNA, 31 bp, Artificial Sequence
  Description of Artificial Sequence:  Enzymatic Nucleic Acid
atatctgaggctagctacaacgaatacacct

SEQ ID NO: 3154 - DNA, 31 bp, Artificial Sequence
  Description of Artificial Sequence:  Enzymatic Nucleic Acid
tatgaataggctagctacaacgactgacata

SEQ ID NO: 3155 - DNA, 31 bp, Artificial Sequence
  Description of Artificial Sequence:  Enzymatic Nucleic Acid
aatatgaaggctagctacaacgaatctgaca

SEQ ID NO: 3156 - DNA, 31 bp, Artificial Sequence
  Description of Artificial Sequence:  Enzymatic Nucleic Acid
ggtcaataggctagctacaacgagaatatct

SEQ ID NO: 3157 - DNA, 31 bp, Artificial Sequence
  Description of Artificial Sequence:  Enzymatic Nucleic Acid
tgggtcaaggctagctacaacgaatgaatat

SEQ ID NO: 3158 - DNA, 31 bp, Artificial Sequence
  Description of Artificial Sequence:  Enzymatic Nucleic Acid
catttgggggctagctacaacgacaatatga

SEQ ID NO: 3159 - DNA, 31 bp, Artificial Sequence
  Description of Artificial Sequence:  Enzymatic Nucleic Acid
attacacaggctagctacaacgattgggtca

SEQ ID NO: 3160 - DNA, 31 bp, Artificial Sequence
  Description of Artificial Sequence:  Enzymatic Nucleic Acid
atattacaggctagctacaacgaatttgggt

SEQ ID NO: 3161 - DNA, 31 bp, Artificial Sequence
  Description of Artificial Sequence:  Enzymatic Nucleic Acid
gaatattaggctagctacaacgaacatttgg

SEQ ID NO: 3162 - DNA, 31 bp, Artificial Sequence
  Description of Artificial Sequence:  Enzymatic Nucleic Acid
ctggaataggctagctacaacgatacacatt

SEQ ID NO: 3163 - DNA, 31 bp, Artificial Sequence
  Description of Artificial Sequence:  Enzymatic Nucleic Acid
aactggaaggctagctacaacgaattacaca

SEQ ID NO: 3164 - DNA, 31 bp, Artificial Sequence
  Description of Artificial Sequence:  Enzymatic Nucleic Acid
agagaaaaggctagctacaacgatggaatat

SEQ ID NO: 3165 - DNA, 31 bp, Artificial Sequence
  Description of Artificial Sequence:  Enzymatic Nucleic Acid
tacttatgggctagctacaacgaagagaaaa

SEQ ID NO: 3166 - DNA, 31 bp, Artificial Sequence
  Description of Artificial Sequence:  Enzymatic Nucleic Acid
attacttaggctagctacaacgagcagagaa

SEQ ID NO: 3167 - DNA, 31 bp, Artificial Sequence
  Description of Artificial Sequence:  Enzymatic Nucleic Acid
tttaattaggctagctacaacgattatgcag

SEQ ID NO: 3168 - DNA, 31 bp, Artificial Sequence
  Description of Artificial Sequence:  Enzymatic Nucleic Acid
tattttaaggctagctacaacgatacttatg

SEQ ID NO: 3169 - DNA, 31 bp, Artificial Sequence
  Description of Artificial Sequence:  Enzymatic Nucleic Acid
taagtataggctagctacaacgatttaatta

SEQ ID NO: 3170 - DNA, 31 bp, Artificial Sequence
  Description of Artificial Sequence:  Enzymatic Nucleic Acid
tttaagtaggctagctacaacgaattttaat

SEQ ID NO: 3171 - DNA, 31 bp, Artificial Sequence
  Description of Artificial Sequence:  Enzymatic Nucleic Acid
tttttaagggctagctacaacgaatatttta

SEQ ID NO: 3172 - DNA, 31 bp, Artificial Sequence
  Description of Artificial Sequence:  Enzymatic Nucleic Acid
actattaaggctagctacaacgattttaagt

SEQ ID NO: 3173 - DNA, 31 bp, Artificial Sequence
  Description of Artificial Sequence:  Enzymatic Nucleic Acid
taaaactaggctagctacaacgataattttt

SEQ ID NO: 3174 - DNA, 31 bp, Artificial Sequence
  Description of Artificial Sequence:  Enzymatic Nucleic Acid
agataaaaggctagctacaacgatattaatt

SEQ ID NO: 3175 - DNA, 31 bp, Artificial Sequence
  Description of Artificial Sequence:  Enzymatic Nucleic Acid
tacccagaggctagctacaacgaaaaactat

SEQ ID NO: 3176 - DNA, 31 bp, Artificial Sequence
  Description of Artificial Sequence:  Enzymatic Nucleic Acid
tatttgtaggctagctacaacgaccagataa

SEQ ID NO: 3177 - DNA, 31 bp, Artificial Sequence
  Description of Artificial Sequence:  Enzymatic Nucleic Acid
tttatttgggctagctacaacgaacccagat

SEQ ID NO: 3178 - DNA, 31 bp, Artificial Sequence
  Description of Artificial Sequence:  Enzymatic Nucleic Acid
actgtttaggctagctacaacgattgtaccc

SEQ ID NO: 3179 - DNA, 31 bp, Artificial Sequence
  Description of Artificial Sequence:  Enzymatic Nucleic Acid
aggcactgggctagctacaacgattatttgt

SEQ ID NO: 3180 - DNA, 31 bp, Artificial Sequence
  Description of Artificial Sequence:  Enzymatic Nucleic Acid
ttcaggcaggctagctacaacgatgtttatt

SEQ ID NO: 3181 - DNA, 31 bp, Artificial Sequence
  Description of Artificial Sequence:  Enzymatic Nucleic Acid
agttcaggggctagctacaacgaactgttta

SEQ ID NO: 3182 - DNA, 31 bp, Artificial Sequence
  Description of Artificial Sequence:  Enzymatic Nucleic Acid
tgaactagggctagctacaacgatcaggcac

SEQ ID NO: 3183 - DNA, 31 bp, Artificial Sequence
  Description of Artificial Sequence:  Enzymatic Nucleic Acid
tctgtgaaggctagctacaacgatagttcag

SEQ ID NO: 3184 - DNA, 31 bp, Artificial Sequence
  Description of Artificial Sequence:  Enzymatic Nucleic Acid
cttgtctgggctagctacaacgagaactagt

SEQ ID NO: 3185 - DNA, 31 bp, Artificial Sequence
  Description of Artificial Sequence:  Enzymatic Nucleic Acid
ttcccttgggctagctacaacgactgtgaac

SEQ ID NO: 3186 - DNA, 31 bp, Artificial Sequence
  Description of Artificial Sequence:  Enzymatic Nucleic Acid
catagaagggctagctacaacgattcccttg

SEQ ID NO: 3187 - DNA, 31 bp, Artificial Sequence
  Description of Artificial Sequence:  Enzymatic Nucleic Acid
tttttacaggctagctacaacgaagaagttt

SEQ ID NO: 3188 - DNA, 31 bp, Artificial Sequence
  Description of Artificial Sequence:  Enzymatic Nucleic Acid
gatttttaggctagctacaacgaatagaagt

SEQ ID NO: 3189 - DNA, 31 bp, Artificial Sequence
  Description of Artificial Sequence:  Enzymatic Nucleic Acid
catagtgaggctagctacaacgattttacat

SEQ ID NO: 3190 - DNA, 31 bp, Artificial Sequence
  Description of Artificial Sequence:  Enzymatic Nucleic Acid
aatcatagggctagctacaacgagattttta

SEQ ID NO: 3191 - DNA, 31 bp, Artificial Sequence
  Description of Artificial Sequence:  Enzymatic Nucleic Acid
agaaatcaggctagctacaacgaagtgattt

SEQ ID NO: 3192 - DNA, 31 bp, Artificial Sequence
  Description of Artificial Sequence:  Enzymatic Nucleic Acid
ttcagaaaggctagctacaacgacatagtga

SEQ ID NO: 3193 - DNA, 31 bp, Artificial Sequence
  Description of Artificial Sequence:  Enzymatic Nucleic Acid
catagcaaggctagctacaacgatcagaaat

SEQ ID NO: 3194 - DNA, 31 bp, Artificial Sequence
  Description of Artificial Sequence:  Enzymatic Nucleic Acid
tcacatagggctagctacaacgaaattcaga

SEQ ID NO: 3195 - DNA, 31 bp, Artificial Sequence
  Description of Artificial Sequence:  Enzymatic Nucleic Acid
gtttcacaggctagctacaacgaagcaattc

SEQ ID NO: 3196 - DNA, 31 bp, Artificial Sequence
  Description of Artificial Sequence:  Enzymatic Nucleic Acid
tagtttcaggctagctacaacgaatagcaat

SEQ ID NO: 3197 - DNA, 31 bp, Artificial Sequence
  Description of Artificial Sequence:  Enzymatic Nucleic Acid
atctgtagggctagctacaacgattcacata

SEQ ID NO: 3198 - DNA, 31 bp, Artificial Sequence
  Description of Artificial Sequence:  Enzymatic Nucleic Acid
aagatctgggctagctacaacgaagtttcac

SEQ ID NO: 3199 - DNA, 31 bp, Artificial Sequence
  Description of Artificial Sequence:  Enzymatic Nucleic Acid
tccaaagaggctagctacaacgactgtagtt

SEQ ID NO: 3200 - DNA, 31 bp, Artificial Sequence
  Description of Artificial Sequence:  Enzymatic Nucleic Acid
aaacagtgggctagctacaacgatccaaaga

SEQ ID NO: 3201 - DNA, 31 bp, Artificial Sequence
  Description of Artificial Sequence:  Enzymatic Nucleic Acid
ctaaacagggctagctacaacgagttccaaa

SEQ ID NO: 3202 - DNA, 31 bp, Artificial Sequence
  Description of Artificial Sequence:  Enzymatic Nucleic Acid
tacctaaaggctagctacaacgaagtgttcc

SEQ ID NO: 3203 - DNA, 31 bp, Artificial Sequence
  Description of Artificial Sequence:  Enzymatic Nucleic Acid
acaccctaggctagctacaacgactaaacag

SEQ ID NO: 3204 - DNA, 31 bp, Artificial Sequence
  Description of Artificial Sequence:  Enzymatic Nucleic Acid
tcttaacaggctagctacaacgacctaccta

SEQ ID NO: 3205 - DNA, 31 bp, Artificial Sequence
  Description of Artificial Sequence:  Enzymatic Nucleic Acid
agtcttaaggctagctacaacgaaccctacc

SEQ ID NO: 3206 - DNA, 31 bp, Artificial Sequence
  Description of Artificial Sequence:  Enzymatic Nucleic Acid
gtgtcaagggctagctacaacgacttaacac

SEQ ID NO: 3207 - DNA, 31 bp, Artificial Sequence
  Description of Artificial Sequence:  Enzymatic Nucleic Acid
gtactgtgggctagctacaacgacaagtctt

SEQ ID NO: 3208 - DNA, 31 bp, Artificial Sequence
  Description of Artificial Sequence:  Enzymatic Nucleic Acid
aggtactgggctagctacaacgagtcaagtc

SEQ ID NO: 3209 - DNA, 31 bp, Artificial Sequence
  Description of Artificial Sequence:  Enzymatic Nucleic Acid
acgaggtaggctagctacaacgatgtgtcaa

SEQ ID NO: 3210 - DNA, 31 bp, Artificial Sequence
  Description of Artificial Sequence:  Enzymatic Nucleic Acid
aaacgaggggctagctacaacgaactgtgtc

SEQ ID NO: 3211 - DNA, 31 bp, Artificial Sequence
  Description of Artificial Sequence:  Enzymatic Nucleic Acid
tgtagaaaggctagctacaacgagaggtact

SEQ ID NO: 3212 - DNA, 31 bp, Artificial Sequence
  Description of Artificial Sequence:  Enzymatic Nucleic Acid
tctctgtgggctagctacaacgaagaaacga

SEQ ID NO: 3213 - DNA, 31 bp, Artificial Sequence
  Description of Artificial Sequence:  Enzymatic Nucleic Acid
tttctctgggctagctacaacgagtagaaac

SEQ ID NO: 3214 - DNA, 31 bp, Artificial Sequence
  Description of Artificial Sequence:  Enzymatic Nucleic Acid
tatggccaggctagctacaacgattctttct

SEQ ID NO: 3215 - DNA, 31 bp, Artificial Sequence
  Description of Artificial Sequence:  Enzymatic Nucleic Acid
aagtatggggctagctacaacgacatttctt

SEQ ID NO: 3216 - DNA, 31 bp, Artificial Sequence
  Description of Artificial Sequence:  Enzymatic Nucleic Acid
ctgaagtaggctagctacaacgaggccattt

SEQ ID NO: 3217 - DNA, 31 bp, Artificial Sequence
  Description of Artificial Sequence:  Enzymatic Nucleic Acid
tcctgaagggctagctacaacgaatggccat

SEQ ID NO: 3218 - DNA, 31 bp, Artificial Sequence
  Description of Artificial Sequence:  Enzymatic Nucleic Acid
cactgcagggctagctacaacgatcctgaag

SEQ ID NO: 3219 - DNA, 31 bp, Artificial Sequence
  Description of Artificial Sequence:  Enzymatic Nucleic Acid
aagcactgggctagctacaacgaagttcctg

SEQ ID NO: 3220 - DNA, 31 bp, Artificial Sequence
  Description of Artificial Sequence:  Enzymatic Nucleic Acid
cataagcaggctagctacaacgatgcagttc

SEQ ID NO: 3221 - DNA, 31 bp, Artificial Sequence
  Description of Artificial Sequence:  Enzymatic Nucleic Acid
ctcataagggctagctacaacgaactgcagt

SEQ ID NO: 3222 - DNA, 31 bp, Artificial Sequence
  Description of Artificial Sequence:  Enzymatic Nucleic Acid
tcccctcaggctagctacaacgaaagcactg

SEQ ID NO: 3223 - DNA, 31 bp, Artificial Sequence
  Description of Artificial Sequence:  Enzymatic Nucleic Acid
cctaaataggctagctacaacgacccctcat

SEQ ID NO: 3224 - DNA, 31 bp, Artificial Sequence
  Description of Artificial Sequence:  Enzymatic Nucleic Acid
ggcctaaaggctagctacaacgaatcccctc

SEQ ID NO: 3225 - DNA, 31 bp, Artificial Sequence
  Description of Artificial Sequence:  Enzymatic Nucleic Acid
tcaagaggggctagctacaacgactaaatat

SEQ ID NO: 3226 - DNA, 31 bp, Artificial Sequence
  Description of Artificial Sequence:  Enzymatic Nucleic Acid
atcaaaaaggctagctacaacgatcaagagg

SEQ ID NO: 3227 - DNA, 31 bp, Artificial Sequence
  Description of Artificial Sequence:  Enzymatic Nucleic Acid
catctacaggctagctacaacgacaaaaatt

SEQ ID NO: 3228 - DNA, 31 bp, Artificial Sequence
  Description of Artificial Sequence:  Enzymatic Nucleic Acid
cccatctaggctagctacaacgaatcaaaaa

SEQ ID NO: 3229 - DNA, 31 bp, Artificial Sequence
  Description of Artificial Sequence:  Enzymatic Nucleic Acid
aatgcccaggctagctacaacgactacatca

SEQ ID NO: 3230 - DNA, 31 bp, Artificial Sequence
  Description of Artificial Sequence:  Enzymatic Nucleic Acid
aaaaaatgggctagctacaacgaccatctac

SEQ ID NO: 3231 - DNA, 31 bp, Artificial Sequence
  Description of Artificial Sequence:  Enzymatic Nucleic Acid
taaaaaaaggctagctacaacgagcccatct

SEQ ID NO: 3232 - DNA, 31 bp, Artificial Sequence
  Description of Artificial Sequence:  Enzymatic Nucleic Acid
aaccactaggctagctacaacgacttaaaaa

SEQ ID NO: 3233 - DNA, 31 bp, Artificial Sequence
  Description of Artificial Sequence:  Enzymatic Nucleic Acid
attaaccaggctagctacaacgataccttaa

SEQ ID NO: 3234 - DNA, 31 bp, Artificial Sequence
  Description of Artificial Sequence:  Enzymatic Nucleic Acid
gtaattaaggctagctacaacgacactacct

SEQ ID NO: 3235 - DNA, 31 bp, Artificial Sequence
  Description of Artificial Sequence:  Enzymatic Nucleic Acid
aaaggtaaggctagctacaacgataaccact

SEQ ID NO: 3236 - DNA, 31 bp, Artificial Sequence
  Description of Artificial Sequence:  Enzymatic Nucleic Acid
cataaaggggctagctacaacgaaattaacc

SEQ ID NO: 3237 - DNA, 31 bp, Artificial Sequence
  Description of Artificial Sequence:  Enzymatic Nucleic Acid
agttcacaggctagctacaacgaaaaggtaa

SEQ ID NO: 3238 - DNA, 31 bp, Artificial Sequence
  Description of Artificial Sequence:  Enzymatic Nucleic Acid
aaagttcaggctagctacaacgaataaaggt

SEQ ID NO: 3239 - DNA, 31 bp, Artificial Sequence
  Description of Artificial Sequence:  Enzymatic Nucleic Acid
attcaaagggctagctacaacgatcacataa

SEQ ID NO: 3240 - DNA, 31 bp, Artificial Sequence
  Description of Artificial Sequence:  Enzymatic Nucleic Acid
ttaaaccaggctagctacaacgatcaaagtt

SEQ ID NO: 3241 - DNA, 31 bp, Artificial Sequence
  Description of Artificial Sequence:  Enzymatic Nucleic Acid
ttgttaaaggctagctacaacgacattcaaa

SEQ ID NO: 3242 - DNA, 31 bp, Artificial Sequence
  Description of Artificial Sequence:  Enzymatic Nucleic Acid
atcttttgggctagctacaacgataaaccat

SEQ ID NO: 3243 - DNA, 31 bp, Artificial Sequence
  Description of Artificial Sequence:  Enzymatic Nucleic Acid
aaaacaaaggctagctacaacgacttttgtt

SEQ ID NO: 3244 - DNA, 31 bp, Artificial Sequence
  Description of Artificial Sequence:  Enzymatic Nucleic Acid
tacaaaaaggctagctacaacgaaaatcttt

SEQ ID NO: 3245 - DNA, 31 bp, Artificial Sequence
  Description of Artificial Sequence:  Enzymatic Nucleic Acid
aatctctaggctagctacaacgaaaaaacaa

SEQ ID NO: 3246 - DNA, 31 bp, Artificial Sequence
  Description of Artificial Sequence:  Enzymatic Nucleic Acid
ctttaaaaggctagctacaacgactctacaa

SEQ ID NO: 3247 - DNA, 31 bp, Artificial Sequence
  Description of Artificial Sequence:  Enzymatic Nucleic Acid
ttctagaaggctagctacaacgatctccccc

SEQ ID NO: 3248 - DNA, 31 bp, Artificial Sequence
  Description of Artificial Sequence:  Enzymatic Nucleic Acid
aacatttaggctagctacaacgattctagaa

SEQ ID NO: 3249 - DNA, 31 bp, Artificial Sequence
  Description of Artificial Sequence:  Enzymatic Nucleic Acid
aggtaacaggctagctacaacgattatttct

SEQ ID NO: 3250 - DNA, 31 bp, Artificial Sequence
  Description of Artificial Sequence:  Enzymatic Nucleic Acid
ttaggtaaggctagctacaacgaatttattt

SEQ ID NO: 3251 - DNA, 31 bp, Artificial Sequence
  Description of Artificial Sequence:  Enzymatic Nucleic Acid
taattaggggctagctacaacgaaacattta

SEQ ID NO: 3252 - DNA, 31 bp, Artificial Sequence
  Description of Artificial Sequence:  Enzymatic Nucleic Acid
tgtaataaggctagctacaacgataggtaac

SEQ ID NO: 3253 - DNA, 31 bp, Artificial Sequence
  Description of Artificial Sequence:  Enzymatic Nucleic Acid
ggctgtaaggctagctacaacgaaattaggt

SEQ ID NO: 3254 - DNA, 31 bp, Artificial Sequence
  Description of Artificial Sequence:  Enzymatic Nucleic Acid
taaggctgggctagctacaacgaaataatta

SEQ ID NO: 3255 - DNA, 31 bp, Artificial Sequence
  Description of Artificial Sequence:  Enzymatic Nucleic Acid
ctttaaggggctagctacaacgatgtaataa

SEQ ID NO: 3256 - DNA, 31 bp, Artificial Sequence
  Description of Artificial Sequence:  Enzymatic Nucleic Acid
gatttttgggctagctacaacgactttaagg

SEQ ID NO: 3257 - DNA, 31 bp, Artificial Sequence
  Description of Artificial Sequence:  Enzymatic Nucleic Acid
aacaaggaggctagctacaacgattttgtct

SEQ ID NO: 3258 - DNA, 31 bp, Artificial Sequence
  Description of Artificial Sequence:  Enzymatic Nucleic Acid
aacttcaaggctagctacaacgaaaggattt

SEQ ID NO: 3259 - DNA, 31 bp, Artificial Sequence
  Description of Artificial Sequence:  Enzymatic Nucleic Acid
taaaaaaaggctagctacaacgattcaacaa

SEQ ID NO: 3260 - DNA, 31 bp, Artificial Sequence
  Description of Artificial Sequence:  Enzymatic Nucleic Acid
taatttagggctagctacaacgacttttttt

SEQ ID NO: 3261 - DNA, 31 bp, Artificial Sequence
  Description of Artificial Sequence:  Enzymatic Nucleic Acid
ctatgtaaggctagctacaacgattagtctt

SEQ ID NO: 3262 - DNA, 31 bp, Artificial Sequence
  Description of Artificial Sequence:  Enzymatic Nucleic Acid
agtctatgggctagctacaacgaaatttagt

SEQ ID NO: 3263 - DNA, 31 bp, Artificial Sequence
  Description of Artificial Sequence:  Enzymatic Nucleic Acid
taagtctaggctagctacaacgagtaattta

SEQ ID NO: 3264 - DNA, 31 bp, Artificial Sequence
  Description of Artificial Sequence:  Enzymatic Nucleic Acid
tgcctaagggctagctacaacgactatgtaa

SEQ ID NO: 3265 - DNA, 31 bp, Artificial Sequence
  Description of Artificial Sequence:  Enzymatic Nucleic Acid
tgttaatgggctagctacaacgactaagtct

SEQ ID NO: 3266 - DNA, 31 bp, Artificial Sequence
  Description of Artificial Sequence:  Enzymatic Nucleic Acid
catgttaaggctagctacaacgagcctaagt

SEQ ID NO: 3267 - DNA, 31 bp, Artificial Sequence
  Description of Artificial Sequence:  Enzymatic Nucleic Acid
caaacatgggctagctacaacgataatgcct

SEQ ID NO: 3268 - DNA, 31 bp, Artificial Sequence
  Description of Artificial Sequence:  Enzymatic Nucleic Acid
cacaaacaggctagctacaacgagttaatgc

SEQ ID NO: 3269 - DNA, 31 bp, Artificial Sequence
  Description of Artificial Sequence:  Enzymatic Nucleic Acid
tccacaaaggctagctacaacgaatgttaat

SEQ ID NO: 3270 - DNA, 31 bp, Artificial Sequence
  Description of Artificial Sequence:  Enzymatic Nucleic Acid
ttcttccaggctagctacaacgaaaacatgt

SEQ ID NO: 3271 - DNA, 31 bp, Artificial Sequence
  Description of Artificial Sequence:  Enzymatic Nucleic Acid
ctgctataggctagctacaacgatcttccac

SEQ ID NO: 3272 - DNA, 31 bp, Artificial Sequence
  Description of Artificial Sequence:  Enzymatic Nucleic Acid
gtctgctaggctagctacaacgaattcttcc

SEQ ID NO: 3273 - DNA, 31 bp, Artificial Sequence
  Description of Artificial Sequence:  Enzymatic Nucleic Acid
tacgtctgggctagctacaacgatatattct

SEQ ID NO: 3274 - DNA, 31 bp, Artificial Sequence
  Description of Artificial Sequence:  Enzymatic Nucleic Acid
aatatacgggctagctacaacgactgctata

SEQ ID NO: 3275 - DNA, 31 bp, Artificial Sequence
  Description of Artificial Sequence:  Enzymatic Nucleic Acid
acaatataggctagctacaacgagtctgcta

SEQ ID NO: 3276 - DNA, 31 bp, Artificial Sequence
  Description of Artificial Sequence:  Enzymatic Nucleic Acid
atacaataggctagctacaacgaacgtctgc

SEQ ID NO: 3277 - DNA, 31 bp, Artificial Sequence
  Description of Artificial Sequence:  Enzymatic Nucleic Acid
tgatacaaggctagctacaacgaatacgtct

SEQ ID NO: 3278 - DNA, 31 bp, Artificial Sequence
  Description of Artificial Sequence:  Enzymatic Nucleic Acid
aaatgataggctagctacaacgaaatatacg

SEQ ID NO: 3279 - DNA, 31 bp, Artificial Sequence
  Description of Artificial Sequence:  Enzymatic Nucleic Acid
tcaaatgaggctagctacaacgaacaatata

SEQ ID NO: 3280 - DNA, 31 bp, Artificial Sequence
  Description of Artificial Sequence:  Enzymatic Nucleic Acid
cactcaaaggctagctacaacgagatacaat

SEQ ID NO: 3281 - DNA, 31 bp, Artificial Sequence
  Description of Artificial Sequence:  Enzymatic Nucleic Acid
aacattcaggctagctacaacgatcaaatga

SEQ ID NO: 3282 - DNA, 31 bp, Artificial Sequence
  Description of Artificial Sequence:  Enzymatic Nucleic Acid
tgggaacaggctagctacaacgatcactcaa

SEQ ID NO: 3283 - DNA, 31 bp, Artificial Sequence
  Description of Artificial Sequence:  Enzymatic Nucleic Acid
cttgggaaggctagctacaacgaattcactc

SEQ ID NO: 3284 - DNA, 31 bp, Artificial Sequence
  Description of Artificial Sequence:  Enzymatic Nucleic Acid
aatgcctaggctagctacaacgattgggaac

SEQ ID NO: 3285 - DNA, 31 bp, Artificial Sequence
  Description of Artificial Sequence:  Enzymatic Nucleic Acid
ctagaatgggctagctacaacgactacttgg

SEQ ID NO: 3286 - DNA, 31 bp, Artificial Sequence
  Description of Artificial Sequence:  Enzymatic Nucleic Acid
gcctagaaggctagctacaacgagcctactt

SEQ ID NO: 3287 - DNA, 31 bp, Artificial Sequence
  Description of Artificial Sequence:  Enzymatic Nucleic Acid
aaatagagggctagctacaacgactagaatg

SEQ ID NO: 3288 - DNA, 31 bp, Artificial Sequence
  Description of Artificial Sequence:  Enzymatic Nucleic Acid
cagttaaaggctagctacaacgaagagccta

SEQ ID NO: 3289 - DNA, 31 bp, Artificial Sequence
  Description of Artificial Sequence:  Enzymatic Nucleic Acid
tgactcagggctagctacaacgataaataga

SEQ ID NO: 3290 - DNA, 31 bp, Artificial Sequence
  Description of Artificial Sequence:  Enzymatic Nucleic Acid
cagtgtgaggctagctacaacgatcagttaa

SEQ ID NO: 3291 - DNA, 31 bp, Artificial Sequence
  Description of Artificial Sequence:  Enzymatic Nucleic Acid
atgcagtgggctagctacaacgagactcagt

SEQ ID NO: 3292 - DNA, 31 bp, Artificial Sequence
  Description of Artificial Sequence:  Enzymatic Nucleic Acid
ctatgcagggctagctacaacgagtgactca

SEQ ID NO: 3293 - DNA, 31 bp, Artificial Sequence
  Description of Artificial Sequence:  Enzymatic Nucleic Acid
ttcctatgggctagctacaacgaagtgtgac

SEQ ID NO: 3294 - DNA, 31 bp, Artificial Sequence
  Description of Artificial Sequence:  Enzymatic Nucleic Acid
aattcctaggctagctacaacgagcagtgtg

SEQ ID NO: 3295 - DNA, 31 bp, Artificial Sequence
  Description of Artificial Sequence:  Enzymatic Nucleic Acid
gttctaaaggctagctacaacgatcctatgc

SEQ ID NO: 3296 - DNA, 31 bp, Artificial Sequence
  Description of Artificial Sequence:  Enzymatic Nucleic Acid
aagttaggggctagctacaacgatctaaatt

SEQ ID NO: 3297 - DNA, 31 bp, Artificial Sequence
  Description of Artificial Sequence:  Enzymatic Nucleic Acid
tataaaagggctagctacaacgataggttct

SEQ ID NO: 3298 - DNA, 31 bp, Artificial Sequence
  Description of Artificial Sequence:  Enzymatic Nucleic Acid
ataacctaggctagctacaacgaaaaagtta

SEQ ID NO: 3299 - DNA, 31 bp, Artificial Sequence
  Description of Artificial Sequence:  Enzymatic Nucleic Acid
tttgataaggctagctacaacgactataaaa

SEQ ID NO: 3300 - DNA, 31 bp, Artificial Sequence
  Description of Artificial Sequence:  Enzymatic Nucleic Acid
agttttgaggctagctacaacgaaacctata

SEQ ID NO: 3301 - DNA, 31 bp, Artificial Sequence
  Description of Artificial Sequence:  Enzymatic Nucleic Acid
gacaacagggctagctacaacgatttgataa

SEQ ID NO: 3302 - DNA, 31 bp, Artificial Sequence
  Description of Artificial Sequence:  Enzymatic Nucleic Acid
ggtgacaaggctagctacaacgaagttttga

SEQ ID NO: 3303 - DNA, 31 bp, Artificial Sequence
  Description of Artificial Sequence:  Enzymatic Nucleic Acid
aatggtgaggctagctacaacgaaacagttt

SEQ ID NO: 3304 - DNA, 31 bp, Artificial Sequence
  Description of Artificial Sequence:  Enzymatic Nucleic Acid
tgcaatggggctagctacaacgagacaacag

SEQ ID NO: 3305 - DNA, 31 bp, Artificial Sequence
  Description of Artificial Sequence:  Enzymatic Nucleic Acid
ttgtgcaaggctagctacaacgaggtgacaa

SEQ ID NO: 3306 - DNA, 31 bp, Artificial Sequence
  Description of Artificial Sequence:  Enzymatic Nucleic Acid
aaattgtgggctagctacaacgaaatggtga

SEQ ID NO: 3307 - DNA, 31 bp, Artificial Sequence
  Description of Artificial Sequence:  Enzymatic Nucleic Acid
caaaattgggctagctacaacgagcaatggt

SEQ ID NO: 3308 - DNA, 31 bp, Artificial Sequence
  Description of Artificial Sequence:  Enzymatic Nucleic Acid
ggacaaaaggctagctacaacgatgtgcaat

SEQ ID NO: 3309 - DNA, 31 bp, Artificial Sequence
  Description of Artificial Sequence:  Enzymatic Nucleic Acid
tattaggaggctagctacaacgaaaaattgt

SEQ ID NO: 3310 - DNA, 31 bp, Artificial Sequence
  Description of Artificial Sequence:  Enzymatic Nucleic Acid
tgtatataggctagctacaacgataggacaa

SEQ ID NO: 3311 - DNA, 31 bp, Artificial Sequence
  Description of Artificial Sequence:  Enzymatic Nucleic Acid
tatgtataggctagctacaacgaattaggac

SEQ ID NO: 3312 - DNA, 31 bp, Artificial Sequence
  Description of Artificial Sequence:  Enzymatic Nucleic Acid
tctatgtaggctagctacaacgaatattagg

SEQ ID NO: 3313 - DNA, 31 bp, Artificial Sequence
  Description of Artificial Sequence:  Enzymatic Nucleic Acid
tttctatgggctagctacaacgaatatatta

SEQ ID NO: 3314 - DNA, 31 bp, Artificial Sequence
  Description of Artificial Sequence:  Enzymatic Nucleic Acid
agtttctaggctagctacaacgagtatatat

SEQ ID NO: 3315 - DNA, 31 bp, Artificial Sequence
  Description of Artificial Sequence:  Enzymatic Nucleic Acid
ccacaaagggctagctacaacgattctatgt

SEQ ID NO: 3316 - DNA, 31 bp, Artificial Sequence
  Description of Artificial Sequence:  Enzymatic Nucleic Acid
atgccccaggctagctacaacgaaaagtttc

SEQ ID NO: 3317 - DNA, 31 bp, Artificial Sequence
  Description of Artificial Sequence:  Enzymatic Nucleic Acid
ttaacatgggctagctacaacgacccacaaa

SEQ ID NO: 3318 - DNA, 31 bp, Artificial Sequence
  Description of Artificial Sequence:  Enzymatic Nucleic Acid
acttaacaggctagctacaacgagccccaca

SEQ ID NO: 3319 - DNA, 31 bp, Artificial Sequence
  Description of Artificial Sequence:  Enzymatic Nucleic Acid
taacttaaggctagctacaacgaatgcccca

SEQ ID NO: 3320 - DNA, 31 bp, Artificial Sequence
  Description of Artificial Sequence:  Enzymatic Nucleic Acid
aactgtaaggctagctacaacgattaacatg

SEQ ID NO: 3321 - DNA, 31 bp, Artificial Sequence
  Description of Artificial Sequence:  Enzymatic Nucleic Acid
gcaaactgggctagctacaacgaaacttaac

SEQ ID NO: 3322 - DNA, 31 bp, Artificial Sequence
  Description of Artificial Sequence:  Enzymatic Nucleic Acid
tgtgcaaaggctagctacaacgatgtaactt

SEQ ID NO: 3323 - DNA, 31 bp, Artificial Sequence
  Description of Artificial Sequence:  Enzymatic Nucleic Acid
aacttgtgggctagctacaacgaaaactgta

SEQ ID NO: 3324 - DNA, 31 bp, Artificial Sequence
  Description of Artificial Sequence:  Enzymatic Nucleic Acid
tgaacttgggctagctacaacgagcaaactg

SEQ ID NO: 3325 - DNA, 31 bp, Artificial Sequence
  Description of Artificial Sequence:  Enzymatic Nucleic Acid
gagatgaaggctagctacaacgattgtgcaa

SEQ ID NO: 3326 - DNA, 31 bp, Artificial Sequence
  Description of Artificial Sequence:  Enzymatic Nucleic Acid
aaatgagaggctagctacaacgagaacttgt

SEQ ID NO: 3327 - DNA, 31 bp, Artificial Sequence
  Description of Artificial Sequence:  Enzymatic Nucleic Acid
aatacaaaggctagctacaacgagagatgaa

SEQ ID NO: 3328 - DNA, 31 bp, Artificial Sequence
  Description of Artificial Sequence:  Enzymatic Nucleic Acid
atggaataggctagctacaacgaaaatgaga

SEQ ID NO: 3329 - DNA, 31 bp, Artificial Sequence
  Description of Artificial Sequence:  Enzymatic Nucleic Acid
caatggaaggctagctacaacgaacaaatga

SEQ ID NO: 3330 - DNA, 31 bp, Artificial Sequence
  Description of Artificial Sequence:  Enzymatic Nucleic Acid
aaaatcaaggctagctacaacgaggaataca

SEQ ID NO: 3331 - DNA, 31 bp, Artificial Sequence
  Description of Artificial Sequence:  Enzymatic Nucleic Acid
aaaaaaaaggctagctacaacgacaatggaa

SEQ ID NO: 3332 - DNA, 31 bp, Artificial Sequence
  Description of Artificial Sequence:  Enzymatic Nucleic Acid
aaaaaatgggctagctacaacgattagaaga

SEQ ID NO: 3333 - DNA, 31 bp, Artificial Sequence
  Description of Artificial Sequence:  Enzymatic Nucleic Acid
agaaaaaaggctagctacaacgagtttagaa

SEQ ID NO: 3334 - DNA, 31 bp, Artificial Sequence
  Description of Artificial Sequence:  Enzymatic Nucleic Acid
atatactgggctagctacaacgatttgaaga

SEQ ID NO: 3335 - DNA, 31 bp, Artificial Sequence
  Description of Artificial Sequence:  Enzymatic Nucleic Acid
tatatataggctagctacaacgatgttttga

SEQ ID NO: 3336 - DNA, 31 bp, Artificial Sequence
  Description of Artificial Sequence:  Enzymatic Nucleic Acid
gttatataggctagctacaacgaactgtttt

SEQ ID NO: 3337 - DNA, 31 bp, Artificial Sequence
  Description of Artificial Sequence:  Enzymatic Nucleic Acid
aagttataggctagctacaacgaatactgtt

SEQ ID NO: 3338 - DNA, 31 bp, Artificial Sequence
  Description of Artificial Sequence:  Enzymatic Nucleic Acid
aaaagttaggctagctacaacgaatatactg

SEQ ID NO: 3339 - DNA, 31 bp, Artificial Sequence
  Description of Artificial Sequence:  Enzymatic Nucleic Acid
aaaaaaagggctagctacaacgatatatata

SEQ ID NO: 3340 - DNA, 31 bp, Artificial Sequence
  Description of Artificial Sequence:  Enzymatic Nucleic Acid
aaaaaaaaggctagctacaacgacccctaaa

SEQ ID NO: 3341 - DNA, 31 bp, Artificial Sequence
  Description of Artificial Sequence:  Enzymatic Nucleic Acid
ttttgctgggctagctacaacgactaaaaaa

SEQ ID NO: 3342 - DNA, 31 bp, Artificial Sequence
  Description of Artificial Sequence:  Enzymatic Nucleic Acid
gttttttgggctagctacaacgatgtctaaa

SEQ ID NO: 3343 - DNA, 31 bp, Artificial Sequence
  Description of Artificial Sequence:  Enzymatic Nucleic Acid
tcagatagggctagctacaacgatttttgct

SEQ ID NO: 3344 - DNA, 31 bp, Artificial Sequence
  Description of Artificial Sequence:  Enzymatic Nucleic Acid
tcttcagaggctagctacaacgaagtttttt

SEQ ID NO: 3345 - DNA, 31 bp, Artificial Sequence
  Description of Artificial Sequence:  Enzymatic Nucleic Acid
aatggaaaggctagctacaacgacttcagat

SEQ ID NO: 3346 - DNA, 31 bp, Artificial Sequence
  Description of Artificial Sequence:  Enzymatic Nucleic Acid
ttgacaaaggctagctacaacgaggaaatct

SEQ ID NO: 3347 - DNA, 31 bp, Artificial Sequence
  Description of Artificial Sequence:  Enzymatic Nucleic Acid
ctttttgaggctagctacaacgaaaatggaa

SEQ ID NO: 3348 - DNA, 31 bp, Artificial Sequence
  Description of Artificial Sequence:  Enzymatic Nucleic Acid
aatcattaggctagctacaacgatttttgac

SEQ ID NO: 3349 - DNA, 31 bp, Artificial Sequence
  Description of Artificial Sequence:  Enzymatic Nucleic Acid
agaaatcaggctagctacaacgatacttttt

SEQ ID NO: 3350 - DNA, 31 bp, Artificial Sequence
  Description of Artificial Sequence:  Enzymatic Nucleic Acid
tcaagaaaggctagctacaacgacattactt

SEQ ID NO: 3351 - DNA, 31 bp, Artificial Sequence
  Description of Artificial Sequence:  Enzymatic Nucleic Acid
cacaattaggctagctacaacgacaagaaat

SEQ ID NO: 3352 - DNA, 31 bp, Artificial Sequence
  Description of Artificial Sequence:  Enzymatic Nucleic Acid
ctacacaaggctagctacaacgatatcaaga

SEQ ID NO: 3353 - DNA, 31 bp, Artificial Sequence
  Description of Artificial Sequence:  Enzymatic Nucleic Acid
tcactacaggctagctacaacgaaattatca

SEQ ID NO: 3354 - DNA, 31 bp, Artificial Sequence
  Description of Artificial Sequence:  Enzymatic Nucleic Acid
attcactaggctagctacaacgaacaattat

SEQ ID NO: 3355 - DNA, 31 bp, Artificial Sequence
  Description of Artificial Sequence:  Enzymatic Nucleic Acid
aacattcaggctagctacaacgatacacaat

SEQ ID NO: 3356 - DNA, 31 bp, Artificial Sequence
  Description of Artificial Sequence:  Enzymatic Nucleic Acid
aaaaaacaggctagctacaacgatcactaca

SEQ ID NO: 3357 - DNA, 31 bp, Artificial Sequence
  Description of Artificial Sequence:  Enzymatic Nucleic Acid
ctaaaaaaggctagctacaacgaattcacta

SEQ ID NO: 3358 - DNA, 31 bp, Artificial Sequence
  Description of Artificial Sequence:  Enzymatic Nucleic Acid
ctgctgggggctagctacaacgatctaaaaa

SEQ ID NO: 3359 - DNA, 31 bp, Artificial Sequence
  Description of Artificial Sequence:  Enzymatic Nucleic Acid
ggtaactgggctagctacaacgatgggttct

SEQ ID NO: 3360 - DNA, 31 bp, Artificial Sequence
  Description of Artificial Sequence:  Enzymatic Nucleic Acid
caaggtaaggctagctacaacgatgctgggt

SEQ ID NO: 3361 - DNA, 31 bp, Artificial Sequence
  Description of Artificial Sequence:  Enzymatic Nucleic Acid
tttcaaggggctagctacaacgaaactgctg

SEQ ID NO: 3362 - DNA, 31 bp, Artificial Sequence
  Description of Artificial Sequence:  Enzymatic Nucleic Acid
aaattcagggctagctacaacgatttcaagg

SEQ ID NO: 3363 - DNA, 31 bp, Artificial Sequence
  Description of Artificial Sequence:  Enzymatic Nucleic Acid
aatataaaggctagctacaacgatcagcttt

SEQ ID NO: 3364 - DNA, 31 bp, Artificial Sequence
  Description of Artificial Sequence:  Enzymatic Nucleic Acid
actaaataggctagctacaacgaaaattcag

SEQ ID NO: 3365 - DNA, 31 bp, Artificial Sequence
  Description of Artificial Sequence:  Enzymatic Nucleic Acid
ttactaaaggctagctacaacgaataaattc

SEQ ID NO: 3366 - DNA, 31 bp, Artificial Sequence
  Description of Artificial Sequence:  Enzymatic Nucleic Acid
agaagttaggctagctacaacgataaatata

SEQ ID NO: 3367 - DNA, 31 bp, Artificial Sequence
  Description of Artificial Sequence:  Enzymatic Nucleic Acid
cacagaagggctagctacaacgatactaaat

SEQ ID NO: 3368 - DNA, 31 bp, Artificial Sequence
  Description of Artificial Sequence:  Enzymatic Nucleic Acid
tattaacaggctagctacaacgaagaagtta

SEQ ID NO: 3369 - DNA, 31 bp, Artificial Sequence
  Description of Artificial Sequence:  Enzymatic Nucleic Acid
agtattaaggctagctacaacgaacagaagt

SEQ ID NO: 3370 - DNA, 31 bp, Artificial Sequence
  Description of Artificial Sequence:  Enzymatic Nucleic Acid
atccagtaggctagctacaacgataacacag

SEQ ID NO: 3371 - DNA, 31 bp, Artificial Sequence
  Description of Artificial Sequence:  Enzymatic Nucleic Acid
ctatccagggctagctacaacgaattaacac

SEQ ID NO: 3372 - DNA, 31 bp, Artificial Sequence
  Description of Artificial Sequence:  Enzymatic Nucleic Acid
tcatgctaggctagctacaacgaccagtatt

SEQ ID NO: 3373 - DNA, 31 bp, Artificial Sequence
  Description of Artificial Sequence:  Enzymatic Nucleic Acid
aattcatgggctagctacaacgatatccagt

SEQ ID NO: 3374 - DNA, 31 bp, Artificial Sequence
  Description of Artificial Sequence:  Enzymatic Nucleic Acid
agaattcaggctagctacaacgagctatcca

SEQ ID NO: 3375 - DNA, 31 bp, Artificial Sequence
  Description of Artificial Sequence:  Enzymatic Nucleic Acid
atgcagaaggctagctacaacgatcatgcta

SEQ ID NO: 3376 - DNA, 31 bp, Artificial Sequence
  Description of Artificial Sequence:  Enzymatic Nucleic Acid
tctcaatgggctagctacaacgaagaattca

SEQ ID NO: 3377 - DNA, 31 bp, Artificial Sequence
  Description of Artificial Sequence:  Enzymatic Nucleic Acid
tttctcaaggctagctacaacgagcagaatt

SEQ ID NO: 3378 - DNA, 31 bp, Artificial Sequence
  Description of Artificial Sequence:  Enzymatic Nucleic Acid
ctattcagggctagctacaacgattctcaat

SEQ ID NO: 3379 - DNA, 31 bp, Artificial Sequence
  Description of Artificial Sequence:  Enzymatic Nucleic Acid
gacagctaggctagctacaacgatcagtttc

SEQ ID NO: 3380 - DNA, 31 bp, Artificial Sequence
  Description of Artificial Sequence:  Enzymatic Nucleic Acid
tatgacagggctagctacaacgatattcagt

SEQ ID NO: 3381 - DNA, 31 bp, Artificial Sequence
  Description of Artificial Sequence:  Enzymatic Nucleic Acid
ttttatgaggctagctacaacgaagctattc

SEQ ID NO: 3382 - DNA, 31 bp, Artificial Sequence
  Description of Artificial Sequence:  Enzymatic Nucleic Acid
gcattttaggctagctacaacgagacagcta

SEQ ID NO: 3383 - DNA, 31 bp, Artificial Sequence
  Description of Artificial Sequence:  Enzymatic Nucleic Acid
agaaagcaggctagctacaacgatttatgac

SEQ ID NO: 3384 - DNA, 31 bp, Artificial Sequence
  Description of Artificial Sequence:  Enzymatic Nucleic Acid
aaagaaagggctagctacaacgaattttatg

SEQ ID NO: 3385 - DNA, 31 bp, Artificial Sequence
  Description of Artificial Sequence:  Enzymatic Nucleic Acid
tgtgagtaggctagctacaacgactttcttt

SEQ ID NO: 3386 - DNA, 31 bp, Artificial Sequence
  Description of Artificial Sequence:  Enzymatic Nucleic Acid
catgtgagggctagctacaacgaatctttct

SEQ ID NO: 3387 - DNA, 31 bp, Artificial Sequence
  Description of Artificial Sequence:  Enzymatic Nucleic Acid
aactcatgggctagctacaacgagagtatct

SEQ ID NO: 3388 - DNA, 31 bp, Artificial Sequence
  Description of Artificial Sequence:  Enzymatic Nucleic Acid
agaactcaggctagctacaacgagtgagtat

SEQ ID NO: 3389 - DNA, 31 bp, Artificial Sequence
  Description of Artificial Sequence:  Enzymatic Nucleic Acid
ttcaagaaggctagctacaacgatcatgtga

SEQ ID NO: 3390 - DNA, 31 bp, Artificial Sequence
  Description of Artificial Sequence:  Enzymatic Nucleic Acid
tatgactaggctagctacaacgatcttcaag

SEQ ID NO: 3391 - DNA, 31 bp, Artificial Sequence
  Description of Artificial Sequence:  Enzymatic Nucleic Acid
agttatgaggctagctacaacgatattcttc

SEQ ID NO: 3392 - DNA, 31 bp, Artificial Sequence
  Description of Artificial Sequence:  Enzymatic Nucleic Acid
tctagttaggctagctacaacgagactattc

SEQ ID NO: 3393 - DNA, 31 bp, Artificial Sequence
  Description of Artificial Sequence:  Enzymatic Nucleic Acid
taatctagggctagctacaacgatatgacta

SEQ ID NO: 3394 - DNA, 31 bp, Artificial Sequence
  Description of Artificial Sequence:  Enzymatic Nucleic Acid
gatcttaaggctagctacaacgactagttat

SEQ ID NO: 3395 - DNA, 31 bp, Artificial Sequence
  Description of Artificial Sequence:  Enzymatic Nucleic Acid
aacacagaggctagctacaacgacttaatct

SEQ ID NO: 3396 - DNA, 31 bp, Artificial Sequence
  Description of Artificial Sequence:  Enzymatic Nucleic Acid
ctaaaacaggctagctacaacgaagatctta

SEQ ID NO: 3397 - DNA, 31 bp, Artificial Sequence
  Description of Artificial Sequence:  Enzymatic Nucleic Acid
aactaaaaggctagctacaacgaacagatct

SEQ ID NO: 3398 - DNA, 31 bp, Artificial Sequence
  Description of Artificial Sequence:  Enzymatic Nucleic Acid
ctattaaaggctagctacaacgataaaacac

SEQ ID NO: 3399 - DNA, 31 bp, Artificial Sequence
  Description of Artificial Sequence:  Enzymatic Nucleic Acid
tcaaactaggctagctacaacgataaactaa

SEQ ID NO: 3400 - DNA, 31 bp, Artificial Sequence
  Description of Artificial Sequence:  Enzymatic Nucleic Acid
acttcaaaggctagctacaacgatattaaac

SEQ ID NO: 3401 - DNA, 31 bp, Artificial Sequence
  Description of Artificial Sequence:  Enzymatic Nucleic Acid
aacaggcaggctagctacaacgattcaaact

SEQ ID NO: 3402 - DNA, 31 bp, Artificial Sequence
  Description of Artificial Sequence:  Enzymatic Nucleic Acid
caaacaggggctagctacaacgaacttcaaa

SEQ ID NO: 3403 - DNA, 31 bp, Artificial Sequence
  Description of Artificial Sequence:  Enzymatic Nucleic Acid
atcccaaaggctagctacaacgaaggcactt

SEQ ID NO: 3404 - DNA, 31 bp, Artificial Sequence
  Description of Artificial Sequence:  Enzymatic Nucleic Acid
tatcattaggctagctacaacgacccaaaca

SEQ ID NO: 3405 - DNA, 31 bp, Artificial Sequence
  Description of Artificial Sequence:  Enzymatic Nucleic Acid
acctatcaggctagctacaacgatatcccaa

SEQ ID NO: 3406 - DNA, 31 bp, Artificial Sequence
  Description of Artificial Sequence:  Enzymatic Nucleic Acid
attacctaggctagctacaacgacattatcc

SEQ ID NO: 3407 - DNA, 31 bp, Artificial Sequence
  Description of Artificial Sequence:  Enzymatic Nucleic Acid
ctaaattaggctagctacaacgactatcatt

SEQ ID NO: 3408 - DNA, 31 bp, Artificial Sequence
  Description of Artificial Sequence:  Enzymatic Nucleic Acid
catctaaaggctagctacaacgatacctatc

SEQ ID NO: 3409 - DNA, 31 bp, Artificial Sequence
  Description of Artificial Sequence:  Enzymatic Nucleic Acid
taaattcaggctagctacaacgactaaatta

SEQ ID NO: 3410 - DNA, 31 bp, Artificial Sequence
  Description of Artificial Sequence:  Enzymatic Nucleic Acid
cccctaaaggctagctacaacgatcatctaa

SEQ ID NO: 3411 - DNA, 31 bp, Artificial Sequence
  Description of Artificial Sequence:  Enzymatic Nucleic Acid
gcagataaggctagctacaacgatttttttt

SEQ ID NO: 3412 - DNA, 31 bp, Artificial Sequence
  Description of Artificial Sequence:  Enzymatic Nucleic Acid
actgcagaggctagctacaacgaaacttttt

SEQ ID NO: 3413 - DNA, 31 bp, Artificial Sequence
  Description of Artificial Sequence:  Enzymatic Nucleic Acid
cataactgggctagctacaacgaagataact

SEQ ID NO: 3414 - DNA, 31 bp, Artificial Sequence
  Description of Artificial Sequence:  Enzymatic Nucleic Acid
caacataaggctagctacaacgatgcagata

SEQ ID NO: 3415 - DNA, 31 bp, Artificial Sequence
  Description of Artificial Sequence:  Enzymatic Nucleic Acid
cctcaacaggctagctacaacgaaactgcag

SEQ ID NO: 3416 - DNA, 31 bp, Artificial Sequence
  Description of Artificial Sequence:  Enzymatic Nucleic Acid
gccctcaaggctagctacaacgaataactgc

SEQ ID NO: 3417 - DNA, 31 bp, Artificial Sequence
  Description of Artificial Sequence:  Enzymatic Nucleic Acid
gagatgggggctagctacaacgacctcaaca

SEQ ID NO: 3418 - DNA, 31 bp, Artificial Sequence
  Description of Artificial Sequence:  Enzymatic Nucleic Acid
gggagagaggctagctacaacgagggccctc

SEQ ID NO: 3419 - DNA, 31 bp, Artificial Sequence
  Description of Artificial Sequence:  Enzymatic Nucleic Acid
tgggggtgggctagctacaacgaggggggag

SEQ ID NO: 3420 - DNA, 31 bp, Artificial Sequence
  Description of Artificial Sequence:  Enzymatic Nucleic Acid
tgtgggggggctagctacaacgagtgggggg

SEQ ID NO: 3421 - DNA, 31 bp, Artificial Sequence
  Description of Artificial Sequence:  Enzymatic Nucleic Acid
tagctctgggctagctacaacgagggggtgt

SEQ ID NO: 3422 - DNA, 31 bp, Artificial Sequence
  Description of Artificial Sequence:  Enzymatic Nucleic Acid
ccagttagggctagctacaacgatctgtggg

SEQ ID NO: 3423 - DNA, 31 bp, Artificial Sequence
  Description of Artificial Sequence:  Enzymatic Nucleic Acid
taacccagggctagctacaacgatagctctg

SEQ ID NO: 3424 - DNA, 31 bp, Artificial Sequence
  Description of Artificial Sequence:  Enzymatic Nucleic Acid
cactgtaaggctagctacaacgaccagttag

SEQ ID NO: 3425 - DNA, 31 bp, Artificial Sequence
  Description of Artificial Sequence:  Enzymatic Nucleic Acid
aaacactgggctagctacaacgaaacccagt

SEQ ID NO: 3426 - DNA, 31 bp, Artificial Sequence
  Description of Artificial Sequence:  Enzymatic Nucleic Acid
ataaaacaggctagctacaacgatgtaaccc

SEQ ID NO: 3427 - DNA, 31 bp, Artificial Sequence
  Description of Artificial Sequence:  Enzymatic Nucleic Acid
ggataaaaggctagctacaacgaactgtaac

SEQ ID NO: 3428 - DNA, 31 bp, Artificial Sequence
  Description of Artificial Sequence:  Enzymatic Nucleic Acid
ctttcggaggctagctacaacgaaaaacact

SEQ ID NO: 3429 - DNA, 31 bp, Artificial Sequence
  Description of Artificial Sequence:  Enzymatic Nucleic Acid
attggaaaggctagctacaacgatttcggat

SEQ ID NO: 3430 - DNA, 31 bp, Artificial Sequence
  Description of Artificial Sequence:  Enzymatic Nucleic Acid
cagtggaaggctagctacaacgatggaaact

SEQ ID NO: 3431 - DNA, 31 bp, Artificial Sequence
  Description of Artificial Sequence:  Enzymatic Nucleic Acid
caagacagggctagctacaacgaggaattgg

SEQ ID NO: 3432 - DNA, 31 bp, Artificial Sequence
  Description of Artificial Sequence:  Enzymatic Nucleic Acid
acacaagaggctagctacaacgaagtggaat

SEQ ID NO: 3433 - DNA, 31 bp, Artificial Sequence
  Description of Artificial Sequence:  Enzymatic Nucleic Acid
tgaaaacaggctagctacaacgaaagacagt

SEQ ID NO: 3434 - DNA, 31 bp, Artificial Sequence
  Description of Artificial Sequence:  Enzymatic Nucleic Acid
catgaaaaggctagctacaacgaacaagaca

SEQ ID NO: 3435 - DNA, 31 bp, Artificial Sequence
  Description of Artificial Sequence:  Enzymatic Nucleic Acid
tttcaacaggctagctacaacgagaaaacac

SEQ ID NO: 3436 - DNA, 31 bp, Artificial Sequence
  Description of Artificial Sequence:  Enzymatic Nucleic Acid
attttcaaggctagctacaacgaatgaaaac

SEQ ID NO: 3437 - DNA, 31 bp, Artificial Sequence
  Description of Artificial Sequence:  Enzymatic Nucleic Acid
caaaagtaggctagctacaacgatttcaaca

SEQ ID NO: 3438 - DNA, 31 bp, Artificial Sequence
  Description of Artificial Sequence:  Enzymatic Nucleic Acid
tgcaaaagggctagctacaacgaattttcaa

SEQ ID NO: 3439 - DNA, 31 bp, Artificial Sequence
  Description of Artificial Sequence:  Enzymatic Nucleic Acid
gaaaaatgggctagctacaacgaaaaagtat

SEQ ID NO: 3440 - DNA, 31 bp, Artificial Sequence
  Description of Artificial Sequence:  Enzymatic Nucleic Acid
aggaaaaaggctagctacaacgagcaaaagt

SEQ ID NO: 3441 - DNA, 31 bp, Artificial Sequence
  Description of Artificial Sequence:  Enzymatic Nucleic Acid
aattggcaggctagctacaacgatcaaagga

SEQ ID NO: 3442 - DNA, 31 bp, Artificial Sequence
  Description of Artificial Sequence:  Enzymatic Nucleic Acid
gaaattggggctagctacaacgaactcaaag

SEQ ID NO: 3443 - DNA, 31 bp, Artificial Sequence
  Description of Artificial Sequence:  Enzymatic Nucleic Acid
gtaagaaaggctagctacaacgatggcactc

SEQ ID NO: 3444 - DNA, 31 bp, Artificial Sequence
  Description of Artificial Sequence:  Enzymatic Nucleic Acid
agtactagggctagctacaacgaaagaaatt

SEQ ID NO: 3445 - DNA, 31 bp, Artificial Sequence
  Description of Artificial Sequence:  Enzymatic Nucleic Acid
aaatagtaggctagctacaacgatagtaaga

SEQ ID NO: 3446 - DNA, 31 bp, Artificial Sequence
  Description of Artificial Sequence:  Enzymatic Nucleic Acid
agaaatagggctagctacaacgaactagtaa

SEQ ID NO: 3447 - DNA, 31 bp, Artificial Sequence
  Description of Artificial Sequence:  Enzymatic Nucleic Acid
ttaagaaaggctagctacaacgaagtactag

SEQ ID NO: 3448 - DNA, 31 bp, Artificial Sequence
  Description of Artificial Sequence:  Enzymatic Nucleic Acid
atgttacaggctagctacaacgataagaaat

SEQ ID NO: 3449 - DNA, 31 bp, Artificial Sequence
  Description of Artificial Sequence:  Enzymatic Nucleic Acid
acatgttaggctagctacaacgaattaagaa

SEQ ID NO: 3450 - DNA, 31 bp, Artificial Sequence
  Description of Artificial Sequence:  Enzymatic Nucleic Acid
taaacatgggctagctacaacgatacattaa

SEQ ID NO: 3451 - DNA, 31 bp, Artificial Sequence
  Description of Artificial Sequence:  Enzymatic Nucleic Acid
ggtaaacaggctagctacaacgagttacatt

SEQ ID NO: 3452 - DNA, 31 bp, Artificial Sequence
  Description of Artificial Sequence:  Enzymatic Nucleic Acid
caggtaaaggctagctacaacgaatgttaca

SEQ ID NO: 3453 - DNA, 31 bp, Artificial Sequence
  Description of Artificial Sequence:  Enzymatic Nucleic Acid
aggccaggggctagctacaacgaaaacatgt

SEQ ID NO: 3454 - DNA, 31 bp, Artificial Sequence
  Description of Artificial Sequence:  Enzymatic Nucleic Acid
aagacaggggctagctacaacgacaggtaaa

SEQ ID NO: 3455 - DNA, 31 bp, Artificial Sequence
  Description of Artificial Sequence:  Enzymatic Nucleic Acid
ttaaaagaggctagctacaacgaaggccagg

SEQ ID NO: 3456 - DNA, 31 bp, Artificial Sequence
  Description of Artificial Sequence:  Enzymatic Nucleic Acid
aaaaatagggctagctacaacgataaaagac

SEQ ID NO: 3457 - DNA, 31 bp, Artificial Sequence
  Description of Artificial Sequence:  Enzymatic Nucleic Acid
tacaaaaaggctagctacaacgaagttaaaa

SEQ ID NO: 3458 - DNA, 31 bp, Artificial Sequence
  Description of Artificial Sequence:  Enzymatic Nucleic Acid
acactataggctagctacaacgaaaaaatag

SEQ ID NO: 3459 - DNA, 31 bp, Artificial Sequence
  Description of Artificial Sequence:  Enzymatic Nucleic Acid
ttacactaggctagctacaacgaacaaaaat

SEQ ID NO: 3460 - DNA, 31 bp, Artificial Sequence
  Description of Artificial Sequence:  Enzymatic Nucleic Acid
agtttacaggctagctacaacgatatacaaa

SEQ ID NO: 3461 - DNA, 31 bp, Artificial Sequence
  Description of Artificial Sequence:  Enzymatic Nucleic Acid
tcagtttaggctagctacaacgaactataca

SEQ ID NO: 3462 - DNA, 31 bp, Artificial Sequence
  Description of Artificial Sequence:  Enzymatic Nucleic Acid
tgtttcagggctagctacaacgattacacta

SEQ ID NO: 3463 - DNA, 31 bp, Artificial Sequence
  Description of Artificial Sequence:  Enzymatic Nucleic Acid
tgtgcatgggctagctacaacgattcagttt

SEQ ID NO: 3464 - DNA, 31 bp, Artificial Sequence
  Description of Artificial Sequence:  Enzymatic Nucleic Acid
aatgtgcaggctagctacaacgagtttcagt

SEQ ID NO: 3465 - DNA, 31 bp, Artificial Sequence
  Description of Artificial Sequence:  Enzymatic Nucleic Acid
aaaatgtgggctagctacaacgaatgtttca

SEQ ID NO: 3466 - DNA, 31 bp, Artificial Sequence
  Description of Artificial Sequence:  Enzymatic Nucleic Acid
acaaaatgggctagctacaacgagcatgttt

SEQ ID NO: 3467 - DNA, 31 bp, Artificial Sequence
  Description of Artificial Sequence:  Enzymatic Nucleic Acid
gtacaaaaggctagctacaacgagtgcatgt

SEQ ID NO: 3468 - DNA, 31 bp, Artificial Sequence
  Description of Artificial Sequence:  Enzymatic Nucleic Acid
acaatgtaggctagctacaacgaaaaatgtg

SEQ ID NO: 3469 - DNA, 31 bp, Artificial Sequence
  Description of Artificial Sequence:  Enzymatic Nucleic Acid
gcacaatgggctagctacaacgaacaaaatg

SEQ ID NO: 3470 - DNA, 31 bp, Artificial Sequence
  Description of Artificial Sequence:  Enzymatic Nucleic Acid
aagcacaaggctagctacaacgagtacaaaa

SEQ ID NO: 3471 - DNA, 31 bp, Artificial Sequence
  Description of Artificial Sequence:  Enzymatic Nucleic Acid
agaaagcaggctagctacaacgaaatgtaca

SEQ ID NO: 3472 - DNA, 31 bp, Artificial Sequence
  Description of Artificial Sequence:  Enzymatic Nucleic Acid
aaagaaagggctagctacaacgaacaatgta

SEQ ID NO: 3473 - DNA, 31 bp, Artificial Sequence
  Description of Artificial Sequence:  Enzymatic Nucleic Acid
atgacccaggctagctacaacgaaaaagaaa

SEQ ID NO: 3474 - DNA, 31 bp, Artificial Sequence
  Description of Artificial Sequence:  Enzymatic Nucleic Acid
gcatatgaggctagctacaacgaccacaaaa

SEQ ID NO: 3475 - DNA, 31 bp, Artificial Sequence
  Description of Artificial Sequence:  Enzymatic Nucleic Acid
actgcataggctagctacaacgagacccaca

SEQ ID NO: 3476 - DNA, 31 bp, Artificial Sequence
  Description of Artificial Sequence:  Enzymatic Nucleic Acid
acactgcaggctagctacaacgaatgaccca

SEQ ID NO: 3477 - DNA, 31 bp, Artificial Sequence
  Description of Artificial Sequence:  Enzymatic Nucleic Acid
tcacactgggctagctacaacgaatatgacc

SEQ ID NO: 3478 - DNA, 31 bp, Artificial Sequence
  Description of Artificial Sequence:  Enzymatic Nucleic Acid
ggatcacaggctagctacaacgatgcatatg

SEQ ID NO: 3479 - DNA, 31 bp, Artificial Sequence
  Description of Artificial Sequence:  Enzymatic Nucleic Acid
ctggatcaggctagctacaacgaactgcata

SEQ ID NO: 3480 - DNA, 31 bp, Artificial Sequence
  Description of Artificial Sequence:  Enzymatic Nucleic Acid
caactggaggctagctacaacgacacactgc

SEQ ID NO: 3481 - DNA, 31 bp, Artificial Sequence
  Description of Artificial Sequence:  Enzymatic Nucleic Acid
gaaaacaaggctagctacaacgatggatcac

SEQ ID NO: 3482 - DNA, 31 bp, Artificial Sequence
  Description of Artificial Sequence:  Enzymatic Nucleic Acid
atggaaaaggctagctacaacgaaactggat

SEQ ID NO: 3483 - DNA, 31 bp, Artificial Sequence
  Description of Artificial Sequence:  Enzymatic Nucleic Acid
ccaaatgaggctagctacaacgaggaaaaca

SEQ ID NO: 3484 - DNA, 31 bp, Artificial Sequence
  Description of Artificial Sequence:  Enzymatic Nucleic Acid
caaccaaaggctagctacaacgagatggaaa

SEQ ID NO: 3485 - DNA, 31 bp, Artificial Sequence
  Description of Artificial Sequence:  Enzymatic Nucleic Acid
cagcgcaaggctagctacaacgacaaatgat

SEQ ID NO: 3486 - DNA, 31 bp, Artificial Sequence
  Description of Artificial Sequence:  Enzymatic Nucleic Acid
ggtcagcgggctagctacaacgaaaccaaat

SEQ ID NO: 3487 - DNA, 31 bp, Artificial Sequence
  Description of Artificial Sequence:  Enzymatic Nucleic Acid
taggtcagggctagctacaacgagcaaccaa

SEQ ID NO: 3488 - DNA, 31 bp, Artificial Sequence
  Description of Artificial Sequence:  Enzymatic Nucleic Acid
ttcctaggggctagctacaacgacagcgcaa

SEQ ID NO: 3489 - DNA, 31 bp, Artificial Sequence
  Description of Artificial Sequence:  Enzymatic Nucleic Acid
gaccaacaggctagctacaacgatcctaggt

SEQ ID NO: 3490 - DNA, 31 bp, Artificial Sequence
  Description of Artificial Sequence:  Enzymatic Nucleic Acid
atgaccaaggctagctacaacgaattcctag

SEQ ID NO: 3491 - DNA, 31 bp, Artificial Sequence
  Description of Artificial Sequence:  Enzymatic Nucleic Acid
tgatatgaggctagctacaacgacaacattc

SEQ ID NO: 3492 - DNA, 31 bp, Artificial Sequence
  Description of Artificial Sequence:  Enzymatic Nucleic Acid
gtttgataggctagctacaacgagaccaaca

SEQ ID NO: 3493 - DNA, 31 bp, Artificial Sequence
  Description of Artificial Sequence:  Enzymatic Nucleic Acid
atgtttgaggctagctacaacgaatgaccaa

SEQ ID NO: 3494 - DNA, 31 bp, Artificial Sequence
  Description of Artificial Sequence:  Enzymatic Nucleic Acid
ttttaatgggctagctacaacgattgatatg

SEQ ID NO: 3495 - DNA, 31 bp, Artificial Sequence
  Description of Artificial Sequence:  Enzymatic Nucleic Acid
atttttaaggctagctacaacgagtttgata

SEQ ID NO: 3496 - DNA, 31 bp, Artificial Sequence
  Description of Artificial Sequence:  Enzymatic Nucleic Acid
agtggtcaggctagctacaacgattttaatg

SEQ ID NO: 3497 - DNA, 31 bp, Artificial Sequence
  Description of Artificial Sequence:  Enzymatic Nucleic Acid
aagagtggggctagctacaacgacattttta

SEQ ID NO: 3498 - DNA, 31 bp, Artificial Sequence
  Description of Artificial Sequence:  Enzymatic Nucleic Acid
taaaagagggctagctacaacgaggtcattt

SEQ ID NO: 3499 - DNA, 31 bp, Artificial Sequence
  Description of Artificial Sequence:  Enzymatic Nucleic Acid
taatttcaggctagctacaacgataaaagag

SEQ ID NO: 3500 - DNA, 31 bp, Artificial Sequence
  Description of Artificial Sequence:  Enzymatic Nucleic Acid
aaagttaaggctagctacaacgattcattaa

SEQ ID NO: 3501 - DNA, 31 bp, Artificial Sequence
  Description of Artificial Sequence:  Enzymatic Nucleic Acid
tttaaaagggctagctacaacgataatttca

SEQ ID NO: 3502 - DNA, 31 bp, Artificial Sequence
  Description of Artificial Sequence:  Enzymatic Nucleic Acid
tataaacaggctagctacaacgattaaaagt

SEQ ID NO: 3503 - DNA, 31 bp, Artificial Sequence
  Description of Artificial Sequence:  Enzymatic Nucleic Acid
cctataaaggctagctacaacgaatttaaaa

SEQ ID NO: 3504 - DNA, 31 bp, Artificial Sequence
  Description of Artificial Sequence:  Enzymatic Nucleic Acid
tactcctaggctagctacaacgaaaacattt

SEQ ID NO: 3505 - DNA, 31 bp, Artificial Sequence
  Description of Artificial Sequence:  Enzymatic Nucleic Acid
agcacataggctagctacaacgatcctataa

SEQ ID NO: 3506 - DNA, 31 bp, Artificial Sequence
  Description of Artificial Sequence:  Enzymatic Nucleic Acid
acagcacaggctagctacaacgaactcctat

SEQ ID NO: 3507 - DNA, 31 bp, Artificial Sequence
  Description of Artificial Sequence:  Enzymatic Nucleic Acid
tcacagcaggctagctacaacgaatactcct

SEQ ID NO: 3508 - DNA, 31 bp, Artificial Sequence
  Description of Artificial Sequence:  Enzymatic Nucleic Acid
cttcacagggctagctacaacgaacatactc

SEQ ID NO: 3509 - DNA, 31 bp, Artificial Sequence
  Description of Artificial Sequence:  Enzymatic Nucleic Acid
tcacttcaggctagctacaacgaagcacata

SEQ ID NO: 3510 - DNA, 31 bp, Artificial Sequence
  Description of Artificial Sequence:  Enzymatic Nucleic Acid
ttagatcaggctagctacaacgattcacagc

SEQ ID NO: 3511 - DNA, 31 bp, Artificial Sequence
  Description of Artificial Sequence:  Enzymatic Nucleic Acid
attttagaggctagctacaacgacacttcac

SEQ ID NO: 3512 - DNA, 31 bp, Artificial Sequence
  Description of Artificial Sequence:  Enzymatic Nucleic Acid
attacaaaggctagctacaacgatttagatc

SEQ ID NO: 3513 - DNA, 31 bp, Artificial Sequence
  Description of Artificial Sequence:  Enzymatic Nucleic Acid
aaatattaggctagctacaacgaaaatttta

SEQ ID NO: 3514 - DNA, 31 bp, Artificial Sequence
  Description of Artificial Sequence:  Enzymatic Nucleic Acid
caaaaataggctagctacaacgatacaaatt

SEQ ID NO: 3515 - DNA, 31 bp, Artificial Sequence
  Description of Artificial Sequence:  Enzymatic Nucleic Acid
gacaaaaaggctagctacaacgaattacaaa

SEQ ID NO: 3516 - DNA, 31 bp, Artificial Sequence
  Description of Artificial Sequence:  Enzymatic Nucleic Acid
gttcatgaggctagctacaacgaaaaaatat

SEQ ID NO: 3517 - DNA, 31 bp, Artificial Sequence
  Description of Artificial Sequence:  Enzymatic Nucleic Acid
acagttcaggctagctacaacgagacaaaaa

SEQ ID NO: 3518 - DNA, 31 bp, Artificial Sequence
  Description of Artificial Sequence:  Enzymatic Nucleic Acid
tagtacagggctagctacaacgatcatgaca

SEQ ID NO: 3519 - DNA, 31 bp, Artificial Sequence
  Description of Artificial Sequence:  Enzymatic Nucleic Acid
gagtagtaggctagctacaacgaagttcatg

SEQ ID NO: 3520 - DNA, 31 bp, Artificial Sequence
  Description of Artificial Sequence:  Enzymatic Nucleic Acid
aggagtagggctagctacaacgaacagttca

SEQ ID NO: 3521 - DNA, 31 bp, Artificial Sequence
  Description of Artificial Sequence:  Enzymatic Nucleic Acid
attaggagggctagctacaacgaagtacagt

SEQ ID NO: 3522 - DNA, 31 bp, Artificial Sequence
  Description of Artificial Sequence:  Enzymatic Nucleic Acid
tacaataaggctagctacaacgataggagta

SEQ ID NO: 3523 - DNA, 31 bp, Artificial Sequence
  Description of Artificial Sequence:  Enzymatic Nucleic Acid
cattacaaggctagctacaacgaaattagga

SEQ ID NO: 3524 - DNA, 31 bp, Artificial Sequence
  Description of Artificial Sequence:  Enzymatic Nucleic Acid
ttacattaggctagctacaacgaaataatta

SEQ ID NO: 3525 - DNA, 31 bp, Artificial Sequence
  Description of Artificial Sequence:  Enzymatic Nucleic Acid
ttattacaggctagctacaacgatacaataa

SEQ ID NO: 3526 - DNA, 31 bp, Artificial Sequence
  Description of Artificial Sequence:  Enzymatic Nucleic Acid
ttttattaggctagctacaacgaattacaat

SEQ ID NO: 3527 - DNA, 31 bp, Artificial Sequence
  Description of Artificial Sequence:  Enzymatic Nucleic Acid
tatttttaggctagctacaacgatacattac

SEQ ID NO: 3528 - DNA, 31 bp, Artificial Sequence
  Description of Artificial Sequence:  Enzymatic Nucleic Acid
tgtaactaggctagctacaacgattttatta

SEQ ID NO: 3529 - DNA, 31 bp, Artificial Sequence
  Description of Artificial Sequence:  Enzymatic Nucleic Acid
cactgtaaggctagctacaacgatattttta

SEQ ID NO: 3530 - DNA, 31 bp, Artificial Sequence
  Description of Artificial Sequence:  Enzymatic Nucleic Acid
agtcactgggctagctacaacgaaactattt

SEQ ID NO: 3531 - DNA, 31 bp, Artificial Sequence
  Description of Artificial Sequence:  Enzymatic Nucleic Acid
catagtcaggctagctacaacgatgtaacta

SEQ ID NO: 3532 - DNA, 31 bp, Artificial Sequence
  Description of Artificial Sequence:  Enzymatic Nucleic Acid
actcatagggctagctacaacgacactgtaa

SEQ ID NO: 3533 - DNA, 31 bp, Artificial Sequence
  Description of Artificial Sequence:  Enzymatic Nucleic Acid
cacactcaggctagctacaacgaagtcactg

SEQ ID NO: 3534 - DNA, 31 bp, Artificial Sequence
  Description of Artificial Sequence:  Enzymatic Nucleic Acid
aatacacaggctagctacaacgatcatagtc

SEQ ID NO: 3535 - DNA, 31 bp, Artificial Sequence
  Description of Artificial Sequence:  Enzymatic Nucleic Acid
taaatacaggctagctacaacgaactcatag

SEQ ID NO: 3536 - DNA, 31 bp, Artificial Sequence
  Description of Artificial Sequence:  Enzymatic Nucleic Acid
aataaataggctagctacaacgaacactcat

SEQ ID NO: 3537 - DNA, 31 bp, Artificial Sequence
  Description of Artificial Sequence:  Enzymatic Nucleic Acid
tgaataaaggctagctacaacgaacacactc

SEQ ID NO: 3538 - DNA, 31 bp, Artificial Sequence
  Description of Artificial Sequence:  Enzymatic Nucleic Acid
tgcatgaaggctagctacaacgaaaatacac

SEQ ID NO: 3539 - DNA, 31 bp, Artificial Sequence
  Description of Artificial Sequence:  Enzymatic Nucleic Acid
aatttgcaggctagctacaacgagaataaat

SEQ ID NO: 3540 - DNA, 31 bp, Artificial Sequence
  Description of Artificial Sequence:  Enzymatic Nucleic Acid
caaatttgggctagctacaacgaatgaataa

SEQ ID NO: 3541 - DNA, 31 bp, Artificial Sequence
  Description of Artificial Sequence:  Enzymatic Nucleic Acid
agttcaaaggctagctacaacgattgcatga

SEQ ID NO: 3542 - DNA, 31 bp, Artificial Sequence
  Description of Artificial Sequence:  Enzymatic Nucleic Acid
gcaaacagggctagctacaacgatcaaattt

SEQ ID NO: 3543 - DNA, 31 bp, Artificial Sequence
  Description of Artificial Sequence:  Enzymatic Nucleic Acid
ggggcaaaggctagctacaacgaagttcaaa

SEQ ID NO: 3544 - DNA, 31 bp, Artificial Sequence
  Description of Artificial Sequence:  Enzymatic Nucleic Acid
tttcggggggctagctacaacgaaaacagtt

SEQ ID NO: 3545 - DNA, 31 bp, Artificial Sequence
  Description of Artificial Sequence:  Enzymatic Nucleic Acid
catatccaggctagctacaacgattcggggc

SEQ ID NO: 3546 - DNA, 31 bp, Artificial Sequence
  Description of Artificial Sequence:  Enzymatic Nucleic Acid
tatccataggctagctacaacgaccatttcg

SEQ ID NO: 3547 - DNA, 31 bp, Artificial Sequence
  Description of Artificial Sequence:  Enzymatic Nucleic Acid
agtatccaggctagctacaacgaatccattt

SEQ ID NO: 3548 - DNA, 31 bp, Artificial Sequence
  Description of Artificial Sequence:  Enzymatic Nucleic Acid
ataaagtaggctagctacaacgaccatatcc

SEQ ID NO: 3549 - DNA, 31 bp, Artificial Sequence
  Description of Artificial Sequence:  Enzymatic Nucleic Acid
ttataaagggctagctacaacgaatccatat

SEQ ID NO: 3550 - DNA, 31 bp, Artificial Sequence
  Description of Artificial Sequence:  Enzymatic Nucleic Acid
atggcttaggctagctacaacgaaaagtatc

SEQ ID NO: 3551 - DNA, 31 bp, Artificial Sequence
  Description of Artificial Sequence:  Enzymatic Nucleic Acid
gtctatggggctagctacaacgattataaag

SEQ ID NO: 3552 - DNA, 31 bp, Artificial Sequence
  Description of Artificial Sequence:  Enzymatic Nucleic Acid
agtgtctaggctagctacaacgaggcttata

SEQ ID NO: 3553 - DNA, 31 bp, Artificial Sequence
  Description of Artificial Sequence:  Enzymatic Nucleic Acid
ctatagtgggctagctacaacgactatggct

SEQ ID NO: 3554 - DNA, 31 bp, Artificial Sequence
  Description of Artificial Sequence:  Enzymatic Nucleic Acid
tactatagggctagctacaacgagtctatgg

SEQ ID NO: 3555 - DNA, 31 bp, Artificial Sequence
  Description of Artificial Sequence:  Enzymatic Nucleic Acid
gtatactaggctagctacaacgaagtgtcta

SEQ ID NO: 3556 - DNA, 31 bp, Artificial Sequence
  Description of Artificial Sequence:  Enzymatic Nucleic Acid
ctggtataggctagctacaacgatatagtgt

SEQ ID NO: 3557 - DNA, 31 bp, Artificial Sequence
  Description of Artificial Sequence:  Enzymatic Nucleic Acid
cactggtaggctagctacaacgaactatagt

SEQ ID NO: 3558 - DNA, 31 bp, Artificial Sequence
  Description of Artificial Sequence:  Enzymatic Nucleic Acid
ttcactggggctagctacaacgaatactata

SEQ ID NO: 3559 - DNA, 31 bp, Artificial Sequence
  Description of Artificial Sequence:  Enzymatic Nucleic Acid
aagattcaggctagctacaacgatggtatac

SEQ ID NO: 3560 - DNA, 31 bp, Artificial Sequence
  Description of Artificial Sequence:  Enzymatic Nucleic Acid
ataaaagaggctagctacaacgatcactggt

SEQ ID NO: 3561 - DNA, 31 bp, Artificial Sequence
  Description of Artificial Sequence:  Enzymatic Nucleic Acid
aagctgcaggctagctacaacgaaaaagatt

SEQ ID NO: 3562 - DNA, 31 bp, Artificial Sequence
  Description of Artificial Sequence:  Enzymatic Nucleic Acid
acaagctgggctagctacaacgaataaaaga

SEQ ID NO: 3563 - DNA, 31 bp, Artificial Sequence
  Description of Artificial Sequence:  Enzymatic Nucleic Acid
ctaacaagggctagctacaacgatgcataaa

SEQ ID NO: 3564 - DNA, 31 bp, Artificial Sequence
  Description of Artificial Sequence:  Enzymatic Nucleic Acid
acttctaaggctagctacaacgaaagctgca

SEQ ID NO: 3565 - DNA, 31 bp, Artificial Sequence
  Description of Artificial Sequence:  Enzymatic Nucleic Acid
aaaggataggctagctacaacgattctaaca

SEQ ID NO: 3566 - DNA, 31 bp, Artificial Sequence
  Description of Artificial Sequence:  Enzymatic Nucleic Acid
taaaaggaggctagctacaacgaacttctaa

SEQ ID NO: 3567 - DNA, 31 bp, Artificial Sequence
  Description of Artificial Sequence:  Enzymatic Nucleic Acid
ttagaaaaggctagctacaacgaaaaaggat

SEQ ID NO: 3568 - DNA, 31 bp, Artificial Sequence
  Description of Artificial Sequence:  Enzymatic Nucleic Acid
ccacagcaggctagctacaacgacttttaga

SEQ ID NO: 3569 - DNA, 31 bp, Artificial Sequence
  Description of Artificial Sequence:  Enzymatic Nucleic Acid
atccacagggctagctacaacgaacctttta

SEQ ID NO: 3570 - DNA, 31 bp, Artificial Sequence
  Description of Artificial Sequence:  Enzymatic Nucleic Acid
aatatccaggctagctacaacgaagcacctt

SEQ ID NO: 3571 - DNA, 31 bp, Artificial Sequence
  Description of Artificial Sequence:  Enzymatic Nucleic Acid
acataataggctagctacaacgaccacagca

SEQ ID NO: 3572 - DNA, 31 bp, Artificial Sequence
  Description of Artificial Sequence:  Enzymatic Nucleic Acid
ttacataaggctagctacaacgaatccacag

SEQ ID NO: 3573 - DNA, 31 bp, Artificial Sequence
  Description of Artificial Sequence:  Enzymatic Nucleic Acid
cctttacaggctagctacaacgaaatatcca

SEQ ID NO: 3574 - DNA, 31 bp, Artificial Sequence
  Description of Artificial Sequence:  Enzymatic Nucleic Acid
cgcctttaggctagctacaacgaataatatc

SEQ ID NO: 3575 - DNA, 31 bp, Artificial Sequence
  Description of Artificial Sequence:  Enzymatic Nucleic Acid
caaacacgggctagctacaacgactttacat

SEQ ID NO: 3576 - DNA, 31 bp, Artificial Sequence
  Description of Artificial Sequence:  Enzymatic Nucleic Acid
agcaaacaggctagctacaacgagcctttac

SEQ ID NO: 3577 - DNA, 31 bp, Artificial Sequence
  Description of Artificial Sequence:  Enzymatic Nucleic Acid
taagcaaaggctagctacaacgaacgccttt

SEQ ID NO: 3578 - DNA, 31 bp, Artificial Sequence
  Description of Artificial Sequence:  Enzymatic Nucleic Acid
tgtttaagggctagctacaacgaaaacacgc

SEQ ID NO: 3579 - DNA, 31 bp, Artificial Sequence
  Description of Artificial Sequence:  Enzymatic Nucleic Acid
gaaaattgggctagctacaacgattaagcaa

SEQ ID NO: 3580 - DNA, 31 bp, Artificial Sequence
  Description of Artificial Sequence:  Enzymatic Nucleic Acid
atggaaaaggctagctacaacgatgtttaag

SEQ ID NO: 3581 - DNA, 31 bp, Artificial Sequence
  Description of Artificial Sequence:  Enzymatic Nucleic Acid
tctaaataggctagctacaacgaggaaaatt

SEQ ID NO: 3582 - DNA, 31 bp, Artificial Sequence
  Description of Artificial Sequence:  Enzymatic Nucleic Acid
cttctaaaggctagctacaacgaatggaaaa

SEQ ID NO: 3583 - DNA, 31 bp, Artificial Sequence
  Description of Artificial Sequence:  Enzymatic Nucleic Acid
tgcatctaggctagctacaacgattctaaat

SEQ ID NO: 3584 - DNA, 31 bp, Artificial Sequence
  Description of Artificial Sequence:  Enzymatic Nucleic Acid
gttttgcaggctagctacaacgactacttct

SEQ ID NO: 3585 - DNA, 31 bp, Artificial Sequence
  Description of Artificial Sequence:  Enzymatic Nucleic Acid
ttgttttgggctagctacaacgaatctactt

SEQ ID NO: 3586 - DNA, 31 bp, Artificial Sequence
  Description of Artificial Sequence:  Enzymatic Nucleic Acid
cagatttgggctagctacaacgatttgcatc

SEQ ID NO: 3587 - DNA, 31 bp, Artificial Sequence
  Description of Artificial Sequence:  Enzymatic Nucleic Acid
aaggcagaggctagctacaacgattgttttg

SEQ ID NO: 3588 - DNA, 31 bp, Artificial Sequence
  Description of Artificial Sequence:  Enzymatic Nucleic Acid
cataaaggggctagctacaacgaagatttgt

SEQ ID NO: 3589 - DNA, 31 bp, Artificial Sequence
  Description of Artificial Sequence:  Enzymatic Nucleic Acid
ttttgtcaggctagctacaacgaaaaggcag

SEQ ID NO: 3590 - DNA, 31 bp, Artificial Sequence
  Description of Artificial Sequence:  Enzymatic Nucleic Acid
tttttttgggctagctacaacgacataaagg

SEQ ID NO: 3591 - DNA, 31 bp, Artificial Sequence
  Description of Artificial Sequence:  Enzymatic Nucleic Acid
ttatcctaggctagctacaacgattttttgt

SEQ ID NO: 3592 - DNA, 31 bp, Artificial Sequence
  Description of Artificial Sequence:  Enzymatic Nucleic Acid
taatgttaggctagctacaacgacctatttt

SEQ ID NO: 3593 - DNA, 31 bp, Artificial Sequence
  Description of Artificial Sequence:  Enzymatic Nucleic Acid
aaataatgggctagctacaacgatatcctat

SEQ ID NO: 3594 - DNA, 31 bp, Artificial Sequence
  Description of Artificial Sequence:  Enzymatic Nucleic Acid
ataaataaggctagctacaacgagttatcct

SEQ ID NO: 3595 - DNA, 31 bp, Artificial Sequence
  Description of Artificial Sequence:  Enzymatic Nucleic Acid
taaataaaggctagctacaacgaaatgttat

SEQ ID NO: 3596 - DNA, 31 bp, Artificial Sequence
  Description of Artificial Sequence:  Enzymatic Nucleic Acid
gaaataaaggctagctacaacgaaaataatg

SEQ ID NO: 3597 - DNA, 31 bp, Artificial Sequence
  Description of Artificial Sequence:  Enzymatic Nucleic Acid
aaaggaaaggctagctacaacgaaaataaat

SEQ ID NO: 3598 - DNA, 31 bp, Artificial Sequence
  Description of Artificial Sequence:  Enzymatic Nucleic Acid
cttattgaggctagctacaacgaaaaaggaa

SEQ ID NO: 3599 - DNA, 31 bp, Artificial Sequence
  Description of Artificial Sequence:  Enzymatic Nucleic Acid
ttaccttaggctagctacaacgatgataaaa

SEQ ID NO: 3600 - DNA, 31 bp, Artificial Sequence
  Description of Artificial Sequence:  Enzymatic Nucleic Acid
atcaattaggctagctacaacgacttattga

SEQ ID NO: 3601 - DNA, 31 bp, Artificial Sequence
  Description of Artificial Sequence:  Enzymatic Nucleic Acid
tgtatcaaggctagctacaacgataccttat

SEQ ID NO: 3602 - DNA, 31 bp, Artificial Sequence
  Description of Artificial Sequence:  Enzymatic Nucleic Acid
gttgtgtaggctagctacaacgacaattacc

SEQ ID NO: 3603 - DNA, 31 bp, Artificial Sequence
  Description of Artificial Sequence:  Enzymatic Nucleic Acid
ctgttgtgggctagctacaacgaatcaatta

SEQ ID NO: 3604 - DNA, 31 bp, Artificial Sequence
  Description of Artificial Sequence:  Enzymatic Nucleic Acid
acctgttgggctagctacaacgagtatcaat

SEQ ID NO: 3605 - DNA, 31 bp, Artificial Sequence
  Description of Artificial Sequence:  Enzymatic Nucleic Acid
gtcacctgggctagctacaacgatgtgtatc

SEQ ID NO: 3606 - DNA, 31 bp, Artificial Sequence
  Description of Artificial Sequence:  Enzymatic Nucleic Acid
ccaagtcaggctagctacaacgactgttgtg

SEQ ID NO: 3607 - DNA, 31 bp, Artificial Sequence
  Description of Artificial Sequence:  Enzymatic Nucleic Acid
aaaccaagggctagctacaacgacacctgtt

SEQ ID NO: 3608 - DNA, 31 bp, Artificial Sequence
  Description of Artificial Sequence:  Enzymatic Nucleic Acid
gcctaaaaggctagctacaacgacaagtcac

SEQ ID NO: 3609 - DNA, 31 bp, Artificial Sequence
  Description of Artificial Sequence:  Enzymatic Nucleic Acid
cctttgggggctagctacaacgactaaaacc

SEQ ID NO: 3610 - DNA, 31 bp, Artificial Sequence
  Description of Artificial Sequence:  Enzymatic Nucleic Acid
tgctgctaggctagctacaacgactttgggc

SEQ ID NO: 3611 - DNA, 31 bp, Artificial Sequence
  Description of Artificial Sequence:  Enzymatic Nucleic Acid
tgctgctgggctagctacaacgatacctttg

SEQ ID NO: 3612 - DNA, 31 bp, Artificial Sequence
  Description of Artificial Sequence:  Enzymatic Nucleic Acid
tgttgctgggctagctacaacgatgctacct

SEQ ID NO: 3613 - DNA, 31 bp, Artificial Sequence
  Description of Artificial Sequence:  Enzymatic Nucleic Acid
taatgttgggctagctacaacgatgctgcta

SEQ ID NO: 3614 - DNA, 31 bp, Artificial Sequence
  Description of Artificial Sequence:  Enzymatic Nucleic Acid
tattaatgggctagctacaacgatgctgctg

SEQ ID NO: 3615 - DNA, 31 bp, Artificial Sequence
  Description of Artificial Sequence:  Enzymatic Nucleic Acid
attattaaggctagctacaacgagttgctgc

SEQ ID NO: 3616 - DNA, 31 bp, Artificial Sequence
  Description of Artificial Sequence:  Enzymatic Nucleic Acid
ttccattaggctagctacaacgataatgttg

SEQ ID NO: 3617 - DNA, 31 bp, Artificial Sequence
  Description of Artificial Sequence:  Enzymatic Nucleic Acid
tatttccaggctagctacaacgatattaatg

SEQ ID NO: 3618 - DNA, 31 bp, Artificial Sequence
  Description of Artificial Sequence:  Enzymatic Nucleic Acid
ttcaattaggctagctacaacgattccatta

SEQ ID NO: 3619 - DNA, 31 bp, Artificial Sequence
  Description of Artificial Sequence:  Enzymatic Nucleic Acid
ctattcaaggctagctacaacgatatttcca

SEQ ID NO: 3620 - DNA, 31 bp, Artificial Sequence
  Description of Artificial Sequence:  Enzymatic Nucleic Acid
actaactaggctagctacaacgatcaattat

SEQ ID NO: 3621 - DNA, 31 bp, Artificial Sequence
  Description of Artificial Sequence:  Enzymatic Nucleic Acid
ataactaaggctagctacaacgatattcaat

SEQ ID NO: 3622 - DNA, 31 bp, Artificial Sequence
  Description of Artificial Sequence:  Enzymatic Nucleic Acid
atacataaggctagctacaacgataactatt

SEQ ID NO: 3623 - DNA, 31 bp, Artificial Sequence
  Description of Artificial Sequence:  Enzymatic Nucleic Acid
aacatacaggctagctacaacgaaactaact

SEQ ID NO: 3624 - DNA, 31 bp, Artificial Sequence
  Description of Artificial Sequence:  Enzymatic Nucleic Acid
ttaacataggctagctacaacgaataactaa

SEQ ID NO: 3625 - DNA, 31 bp, Artificial Sequence
  Description of Artificial Sequence:  Enzymatic Nucleic Acid
cattaacaggctagctacaacgaacataact

SEQ ID NO: 3626 - DNA, 31 bp, Artificial Sequence
  Description of Artificial Sequence:  Enzymatic Nucleic Acid
ggcattaaggctagctacaacgaatacataa

SEQ ID NO: 3627 - DNA, 31 bp, Artificial Sequence
  Description of Artificial Sequence:  Enzymatic Nucleic Acid
gactggcaggctagctacaacgataacatac

SEQ ID NO: 3628 - DNA, 31 bp, Artificial Sequence
  Description of Artificial Sequence:  Enzymatic Nucleic Acid
gtgactggggctagctacaacgaattaacat

SEQ ID NO: 3629 - DNA, 31 bp, Artificial Sequence
  Description of Artificial Sequence:  Enzymatic Nucleic Acid
gctggtgaggctagctacaacgatggcatta

SEQ ID NO: 3630 - DNA, 31 bp, Artificial Sequence
  Description of Artificial Sequence:  Enzymatic Nucleic Acid
cctgctggggctagctacaacgagactggca

SEQ ID NO: 3631 - DNA, 31 bp, Artificial Sequence
  Description of Artificial Sequence:  Enzymatic Nucleic Acid
atagcctgggctagctacaacgatggtgact

SEQ ID NO: 3632 - DNA, 31 bp, Artificial Sequence
  Description of Artificial Sequence:  Enzymatic Nucleic Acid
tgaaatagggctagctacaacgactgctggt

SEQ ID NO: 3633 - DNA, 31 bp, Artificial Sequence
  Description of Artificial Sequence:  Enzymatic Nucleic Acid
ccttgaaaggctagctacaacgaagcctgct

SEQ ID NO: 3634 - DNA, 31 bp, Artificial Sequence
  Description of Artificial Sequence:  Enzymatic Nucleic Acid
acttctgaggctagctacaacgacttgaaat

SEQ ID NO: 3635 - DNA, 31 bp, Artificial Sequence
  Description of Artificial Sequence:  Enzymatic Nucleic Acid
agtcattaggctagctacaacgattctgacc

SEQ ID NO: 3636 - DNA, 31 bp, Artificial Sequence
  Description of Artificial Sequence:  Enzymatic Nucleic Acid
tggagtcaggctagctacaacgatacttctg

SEQ ID NO: 3637 - DNA, 31 bp, Artificial Sequence
  Description of Artificial Sequence:  Enzymatic Nucleic Acid
gtatggagggctagctacaacgacattactt

SEQ ID NO: 3638 - DNA, 31 bp, Artificial Sequence
  Description of Artificial Sequence:  Enzymatic Nucleic Acid
aatatgtaggctagctacaacgaggagtcat

SEQ ID NO: 3639 - DNA, 31 bp, Artificial Sequence
  Description of Artificial Sequence:  Enzymatic Nucleic Acid
ataatatgggctagctacaacgaatggagtc

SEQ ID NO: 3640 - DNA, 31 bp, Artificial Sequence
  Description of Artificial Sequence:  Enzymatic Nucleic Acid
aaataataggctagctacaacgagtatggag

SEQ ID NO: 3641 - DNA, 31 bp, Artificial Sequence
  Description of Artificial Sequence:  Enzymatic Nucleic Acid
ataaataaggctagctacaacgaatgtatgg

SEQ ID NO: 3642 - DNA, 31 bp, Artificial Sequence
  Description of Artificial Sequence:  Enzymatic Nucleic Acid
gaaataaaggctagctacaacgaaatatgta

SEQ ID NO: 3643 - DNA, 31 bp, Artificial Sequence
  Description of Artificial Sequence:  Enzymatic Nucleic Acid
tatagaaaggctagctacaacgaaaataata

SEQ ID NO: 3644 - DNA, 31 bp, Artificial Sequence
  Description of Artificial Sequence:  Enzymatic Nucleic Acid
tgtagttaggctagctacaacgaagaaataa

SEQ ID NO: 3645 - DNA, 31 bp, Artificial Sequence
  Description of Artificial Sequence:  Enzymatic Nucleic Acid
aaatgtagggctagctacaacgatatagaaa

SEQ ID NO: 3646 - DNA, 31 bp, Artificial Sequence
  Description of Artificial Sequence:  Enzymatic Nucleic Acid
tttaaatgggctagctacaacgaagttatag

SEQ ID NO: 3647 - DNA, 31 bp, Artificial Sequence
  Description of Artificial Sequence:  Enzymatic Nucleic Acid
gatttaaaggctagctacaacgagtagttat

SEQ ID NO: 3648 - DNA, 31 bp, Artificial Sequence
  Description of Artificial Sequence:  Enzymatic Nucleic Acid
ggtaatgaggctagctacaacgattaaatgt

SEQ ID NO: 3649 - DNA, 31 bp, Artificial Sequence
  Description of Artificial Sequence:  Enzymatic Nucleic Acid
cctggtaaggctagctacaacgagatttaaa

SEQ ID NO: 3650 - DNA, 31 bp, Artificial Sequence
  Description of Artificial Sequence:  Enzymatic Nucleic Acid
gggaaaggggctagctacaacgatgggatcc

SEQ ID NO: 3651 - DNA, 31 bp, Artificial Sequence
  Description of Artificial Sequence:  Enzymatic Nucleic Acid
gctacgggggctagctacaacgatggggaaa

SEQ ID NO: 3652 - DNA, 31 bp, Artificial Sequence
  Description of Artificial Sequence:  Enzymatic Nucleic Acid
cggggctaggctagctacaacgagggctggg

SEQ ID NO: 3653 - DNA, 31 bp, Artificial Sequence
  Description of Artificial Sequence:  Enzymatic Nucleic Acid
tcccggggggctagctacaacgatacgggct

SEQ ID NO: 3654 - DNA, 31 bp, Artificial Sequence
  Description of Artificial Sequence:  Enzymatic Nucleic Acid
cgcggaggggctagctacaacgacccggggc

SEQ ID NO: 3655 - DNA, 31 bp, Artificial Sequence
  Description of Artificial Sequence:  Enzymatic Nucleic Acid
gcccaccgggctagctacaacgaggaggtcc

SEQ ID NO: 3656 - DNA, 31 bp, Artificial Sequence
  Description of Artificial Sequence:  Enzymatic Nucleic Acid
gccgcccaggctagctacaacgacgcggagg

SEQ ID NO: 3657 - DNA, 31 bp, Artificial Sequence
  Description of Artificial Sequence:  Enzymatic Nucleic Acid
cggcgccgggctagctacaacgaccaccgcg

SEQ ID NO: 3658 - DNA, 31 bp, Artificial Sequence
  Description of Artificial Sequence:  Enzymatic Nucleic Acid
gcgcggcgggctagctacaacgacgcccacc

SEQ ID NO: 3659 - DNA, 31 bp, Artificial Sequence
  Description of Artificial Sequence:  Enzymatic Nucleic Acid
cagcgcggggctagctacaacgagccgccca

SEQ ID NO: 3660 - DNA, 31 bp, Artificial Sequence
  Description of Artificial Sequence:  Enzymatic Nucleic Acid
cggcagcgggctagctacaacgaggcgccgc

SEQ ID NO: 3661 - DNA, 31 bp, Artificial Sequence
  Description of Artificial Sequence:  Enzymatic Nucleic Acid
gccggcagggctagctacaacgagcggcgcc

SEQ ID NO: 3662 - DNA, 31 bp, Artificial Sequence
  Description of Artificial Sequence:  Enzymatic Nucleic Acid
tgcgccggggctagctacaacgaagcgcggc

SEQ ID NO: 3663 - DNA, 31 bp, Artificial Sequence
  Description of Artificial Sequence:  Enzymatic Nucleic Acid
tccctgcgggctagctacaacgacggcagcg

SEQ ID NO: 3664 - DNA, 31 bp, Artificial Sequence
  Description of Artificial Sequence:  Enzymatic Nucleic Acid
cctccctgggctagctacaacgagccggcag

SEQ ID NO: 3665 - DNA, 31 bp, Artificial Sequence
  Description of Artificial Sequence:  Enzymatic Nucleic Acid
accagaggggctagctacaacgacctccctg

SEQ ID NO: 3666 - DNA, 31 bp, Artificial Sequence
  Description of Artificial Sequence:  Enzymatic Nucleic Acid
ccggtgcaggctagctacaacgacagaggcc

SEQ ID NO: 3667 - DNA, 31 bp, Artificial Sequence
  Description of Artificial Sequence:  Enzymatic Nucleic Acid
tgccggtgggctagctacaacgaaccagagg

SEQ ID NO: 3668 - DNA, 31 bp, Artificial Sequence
  Description of Artificial Sequence:  Enzymatic Nucleic Acid
ggtgccggggctagctacaacgagcaccaga

SEQ ID NO: 3669 - DNA, 31 bp, Artificial Sequence
  Description of Artificial Sequence:  Enzymatic Nucleic Acid
cagcggtgggctagctacaacgacggtgcac

SEQ ID NO: 3670 - DNA, 31 bp, Artificial Sequence
  Description of Artificial Sequence:  Enzymatic Nucleic Acid
ctcagcggggctagctacaacgagccggtgc

SEQ ID NO: 3671 - DNA, 31 bp, Artificial Sequence
  Description of Artificial Sequence:  Enzymatic Nucleic Acid
cgactcagggctagctacaacgaggtgccgg

SEQ ID NO: 3672 - DNA, 31 bp, Artificial Sequence
  Description of Artificial Sequence:  Enzymatic Nucleic Acid
gaacccgaggctagctacaacgatcagcggt

SEQ ID NO: 3673 - DNA, 31 bp, Artificial Sequence
  Description of Artificial Sequence:  Enzymatic Nucleic Acid
cgagagaaggctagctacaacgaccgactca

SEQ ID NO: 3674 - DNA, 31 bp, Artificial Sequence
  Description of Artificial Sequence:  Enzymatic Nucleic Acid
caggccggggctagctacaacgagagagaac

SEQ ID NO: 3675 - DNA, 31 bp, Artificial Sequence
  Description of Artificial Sequence:  Enzymatic Nucleic Acid
ggaacaggggctagctacaacgacggcgaga

SEQ ID NO: 3676 - DNA, 31 bp, Artificial Sequence
  Description of Artificial Sequence:  Enzymatic Nucleic Acid
cccgggaaggctagctacaacgaaggccggc

SEQ ID NO: 3677 - DNA, 31 bp, Artificial Sequence
  Description of Artificial Sequence:  Enzymatic Nucleic Acid
gccccgggggctagctacaacgatctcccgg

SEQ ID NO: 3678 - DNA, 31 bp, Artificial Sequence
  Description of Artificial Sequence:  Enzymatic Nucleic Acid
gagcagggggctagctacaacgacccgggct

SEQ ID NO: 3679 - DNA, 31 bp, Artificial Sequence
  Description of Artificial Sequence:  Enzymatic Nucleic Acid
tctccgagggctagctacaacgaagggcccc

SEQ ID NO: 3680 - DNA, 31 bp, Artificial Sequence
  Description of Artificial Sequence:  Enzymatic Nucleic Acid
gggcggcaggctagctacaacgactccgagc

SEQ ID NO: 3681 - DNA, 31 bp, Artificial Sequence
  Description of Artificial Sequence:  Enzymatic Nucleic Acid
cggggcggggctagctacaacgaatctccga

SEQ ID NO: 3682 - DNA, 31 bp, Artificial Sequence
  Description of Artificial Sequence:  Enzymatic Nucleic Acid
gcccggggggctagctacaacgaggcatctc

SEQ ID NO: 3683 - DNA, 31 bp, Artificial Sequence
  Description of Artificial Sequence:  Enzymatic Nucleic Acid
tctgggggggctagctacaacgaccggggcg

SEQ ID NO: 3684 - DNA, 31 bp, Artificial Sequence
  Description of Artificial Sequence:  Enzymatic Nucleic Acid
agccggtgggctagctacaacgactgggggc

SEQ ID NO: 3685 - DNA, 31 bp, Artificial Sequence
  Description of Artificial Sequence:  Enzymatic Nucleic Acid
ggagccggggctagctacaacgagtctgggg

SEQ ID NO: 3686 - DNA, 31 bp, Artificial Sequence
  Description of Artificial Sequence:  Enzymatic Nucleic Acid
ccagggagggctagctacaacgacggtgtct

SEQ ID NO: 3687 - DNA, 31 bp, Artificial Sequence
  Description of Artificial Sequence:  Enzymatic Nucleic Acid
gaggaaggggctagctacaacgacagggagc

SEQ ID NO: 3688 - DNA, 31 bp, Artificial Sequence
  Description of Artificial Sequence:  Enzymatic Nucleic Acid
cggggttgggctagctacaacgatcgaggaa

SEQ ID NO: 3689 - DNA, 31 bp, Artificial Sequence
  Description of Artificial Sequence:  Enzymatic Nucleic Acid
gctcggggggctagctacaacgatgctcgag

SEQ ID NO: 3690 - DNA, 31 bp, Artificial Sequence
  Description of Artificial Sequence:  Enzymatic Nucleic Acid
gagccgagggctagctacaacgatcggggtt

SEQ ID NO: 3691 - DNA, 31 bp, Artificial Sequence
  Description of Artificial Sequence:  Enzymatic Nucleic Acid
gaccggagggctagctacaacgacgagctcg

SEQ ID NO: 3692 - DNA, 31 bp, Artificial Sequence
  Description of Artificial Sequence:  Enzymatic Nucleic Acid
gctggagaggctagctacaacgacggagccg

SEQ ID NO: 3693 - DNA, 31 bp, Artificial Sequence
  Description of Artificial Sequence:  Enzymatic Nucleic Acid
gggcttggggctagctacaacgatggagacc

SEQ ID NO: 3694 - DNA, 31 bp, Artificial Sequence
  Description of Artificial Sequence:  Enzymatic Nucleic Acid
gggttgggggctagctacaacgattggctgg

SEQ ID NO: 3695 - DNA, 31 bp, Artificial Sequence
  Description of Artificial Sequence:  Enzymatic Nucleic Acid
tctcggggggctagctacaacgatgggcttg

SEQ ID NO: 3696 - DNA, 31 bp, Artificial Sequence
  Description of Artificial Sequence:  Enzymatic Nucleic Acid
ggccgcggggctagctacaacgactctcggg

SEQ ID NO: 3697 - DNA, 31 bp, Artificial Sequence
  Description of Artificial Sequence:  Enzymatic Nucleic Acid
tagggccgggctagctacaacgaggcctctc

SEQ ID NO: 3698 - DNA, 31 bp, Artificial Sequence
  Description of Artificial Sequence:  Enzymatic Nucleic Acid
cagtagggggctagctacaacgacgcggcct

SEQ ID NO: 3699 - DNA, 31 bp, Artificial Sequence
  Description of Artificial Sequence:  Enzymatic Nucleic Acid
ggagccagggctagctacaacgaagggccgc

SEQ ID NO: 3700 - DNA, 31 bp, Artificial Sequence
  Description of Artificial Sequence:  Enzymatic Nucleic Acid
aggcggagggctagctacaacgacagtaggg

SEQ ID NO: 3701 - DNA, 31 bp, Artificial Sequence
  Description of Artificial Sequence:  Enzymatic Nucleic Acid
gcgggaggggctagctacaacgaggagccag

SEQ ID NO: 3702 - DNA, 31 bp, Artificial Sequence
  Description of Artificial Sequence:  Enzymatic Nucleic Acid
gagcaacgggctagctacaacgagggaggcg

SEQ ID NO: 3703 - DNA, 31 bp, Artificial Sequence
  Description of Artificial Sequence:  Enzymatic Nucleic Acid
gggagcaaggctagctacaacgagcgggagg

SEQ ID NO: 3704 - DNA, 31 bp, Artificial Sequence
  Description of Artificial Sequence:  Enzymatic Nucleic Acid
tccgggagggctagctacaacgaaacgcggg

SEQ ID NO: 3705 - DNA, 31 bp, Artificial Sequence
  Description of Artificial Sequence:  Enzymatic Nucleic Acid
gggcggggggctagctacaacgattccggga

SEQ ID NO: 3706 - DNA, 31 bp, Artificial Sequence
  Description of Artificial Sequence:  Enzymatic Nucleic Acid
cggtcgggggctagctacaacgaggggcttc

SEQ ID NO: 3707 - DNA, 31 bp, Artificial Sequence
  Description of Artificial Sequence:  Enzymatic Nucleic Acid
agccgcggggctagctacaacgacgggcggg

SEQ ID NO: 3708 - DNA, 31 bp, Artificial Sequence
  Description of Artificial Sequence:  Enzymatic Nucleic Acid
aggagccgggctagctacaacgaggtcgggc

SEQ ID NO: 3709 - DNA, 31 bp, Artificial Sequence
  Description of Artificial Sequence:  Enzymatic Nucleic Acid
gtcaggagggctagctacaacgacgcggtcg

SEQ ID NO: 3710 - DNA, 31 bp, Artificial Sequence
  Description of Artificial Sequence:  Enzymatic Nucleic Acid
cccgtctgggctagctacaacgacaggagcc

SEQ ID NO: 3711 - DNA, 31 bp, Artificial Sequence
  Description of Artificial Sequence:  Enzymatic Nucleic Acid
gcggcccgggctagctacaacgactgtcagg

SEQ ID NO: 3712 - DNA, 31 bp, Artificial Sequence
  Description of Artificial Sequence:  Enzymatic Nucleic Acid
ctgagcggggctagctacaacgaccgtctgt

SEQ ID NO: 3713 - DNA, 31 bp, Artificial Sequence
  Description of Artificial Sequence:  Enzymatic Nucleic Acid
tggctgagggctagctacaacgaggcccgtc

SEQ ID NO: 3714 - DNA, 31 bp, Artificial Sequence
  Description of Artificial Sequence:  Enzymatic Nucleic Acid
ccggttggggctagctacaacgatgagcggc

SEQ ID NO: 3715 - DNA, 31 bp, Artificial Sequence
  Description of Artificial Sequence:  Enzymatic Nucleic Acid
caccccggggctagctacaacgatggctgag

SEQ ID NO: 3716 - DNA, 31 bp, Artificial Sequence
  Description of Artificial Sequence:  Enzymatic Nucleic Acid
ccgccccaggctagctacaacgacccggttg

SEQ ID NO: 3717 - DNA, 31 bp, Artificial Sequence
  Description of Artificial Sequence:  Enzymatic Nucleic Acid
gggccccgggctagctacaacgacccacccc

SEQ ID NO: 3718 - DNA, 31 bp, Artificial Sequence
  Description of Artificial Sequence:  Enzymatic Nucleic Acid
ccatcgggggctagctacaacgacccgcccc

SEQ ID NO: 3719 - DNA, 31 bp, Artificial Sequence
  Description of Artificial Sequence:  Enzymatic Nucleic Acid
gcgcgccaggctagctacaacgacgggcccc

SEQ ID NO: 3720 - DNA, 31 bp, Artificial Sequence
  Description of Artificial Sequence:  Enzymatic Nucleic Acid
gctgcgcgggctagctacaacgacatcgggc

SEQ ID NO: 3721 - DNA, 31 bp, Artificial Sequence
  Description of Artificial Sequence:  Enzymatic Nucleic Acid
tggctgcgggctagctacaacgagccatcgg

SEQ ID NO: 3722 - DNA, 31 bp, Artificial Sequence
  Description of Artificial Sequence:  Enzymatic Nucleic Acid
attggctgggctagctacaacgagcgccatc

SEQ ID NO: 3723 - DNA, 31 bp, Artificial Sequence
  Description of Artificial Sequence:  Enzymatic Nucleic Acid
accattggggctagctacaacgatgcgcgcc

SEQ ID NO: 3724 - DNA, 31 bp, Artificial Sequence
  Description of Artificial Sequence:  Enzymatic Nucleic Acid
gcctaccaggctagctacaacgatggctgcg

SEQ ID NO: 3725 - DNA, 31 bp, Artificial Sequence
  Description of Artificial Sequence:  Enzymatic Nucleic Acid
gcggcctaggctagctacaacgacattggct

SEQ ID NO: 3726 - DNA, 31 bp, Artificial Sequence
  Description of Artificial Sequence:  Enzymatic Nucleic Acid
aggcgcggggctagctacaacgactaccatt

SEQ ID NO: 3727 - DNA, 31 bp, Artificial Sequence
  Description of Artificial Sequence:  Enzymatic Nucleic Acid
gccaggcgggctagctacaacgaggcctacc

SEQ ID NO: 3728 - DNA, 31 bp, Artificial Sequence
  Description of Artificial Sequence:  Enzymatic Nucleic Acid
ctgccaggggctagctacaacgagcggccta

SEQ ID NO: 3729 - DNA, 31 bp, Artificial Sequence
  Description of Artificial Sequence:  Enzymatic Nucleic Acid
tccgtctgggctagctacaacgacaggcgcg

SEQ ID NO: 3730 - DNA, 31 bp, Artificial Sequence
  Description of Artificial Sequence:  Enzymatic Nucleic Acid
cccgtccgggctagctacaacgactgccagg

SEQ ID NO: 3731 - DNA, 31 bp, Artificial Sequence
  Description of Artificial Sequence:  Enzymatic Nucleic Acid
cgcgcccgggctagctacaacgaccgtctgc

SEQ ID NO: 3732 - DNA, 31 bp, Artificial Sequence
  Description of Artificial Sequence:  Enzymatic Nucleic Acid
gccccgcgggctagctacaacgaccgtccgt

SEQ ID NO: 3733 - DNA, 31 bp, Artificial Sequence
  Description of Artificial Sequence:  Enzymatic Nucleic Acid
ccgccccgggctagctacaacgagcccgtcc

SEQ ID NO: 3734 - DNA, 31 bp, Artificial Sequence
  Description of Artificial Sequence:  Enzymatic Nucleic Acid
acgccccgggctagctacaacgacccgcgcc

SEQ ID NO: 3735 - DNA, 31 bp, Artificial Sequence
  Description of Artificial Sequence:  Enzymatic Nucleic Acid
tgcgcacgggctagctacaacgacccgcccc

SEQ ID NO: 3736 - DNA, 31 bp, Artificial Sequence
  Description of Artificial Sequence:  Enzymatic Nucleic Acid
cctgcgcaggctagctacaacgagccccgcc

SEQ ID NO: 3737 - DNA, 31 bp, Artificial Sequence
  Description of Artificial Sequence:  Enzymatic Nucleic Acid
ggcctgcgggctagctacaacgaacgccccg

SEQ ID NO: 3738 - DNA, 31 bp, Artificial Sequence
  Description of Artificial Sequence:  Enzymatic Nucleic Acid
cgggcctgggctagctacaacgagcacgccc

SEQ ID NO: 3739 - DNA, 31 bp, Artificial Sequence
  Description of Artificial Sequence:  Enzymatic Nucleic Acid
cgggcgggggctagctacaacgactgcgcac

SEQ ID NO: 3740 - DNA, 31 bp, Artificial Sequence
  Description of Artificial Sequence:  Enzymatic Nucleic Acid
gactcgggggctagctacaacgagggcctgc

SEQ ID NO: 3741 - DNA, 31 bp, Artificial Sequence
  Description of Artificial Sequence:  Enzymatic Nucleic Acid
ggcggagaggctagctacaacgatcgggcgg

SEQ ID NO: 3742 - DNA, 31 bp, Artificial Sequence
  Description of Artificial Sequence:  Enzymatic Nucleic Acid
acgggcggggctagctacaacgaggagactc

SEQ ID NO: 3743 - DNA, 31 bp, Artificial Sequence
  Description of Artificial Sequence:  Enzymatic Nucleic Acid
ggcacgggggctagctacaacgaggcggaga

SEQ ID NO: 3744 - DNA, 31 bp, Artificial Sequence
  Description of Artificial Sequence:  Enzymatic Nucleic Acid
gcagggcaggctagctacaacgagggcggcg

SEQ ID NO: 3745 - DNA, 31 bp, Artificial Sequence
  Description of Artificial Sequence:  Enzymatic Nucleic Acid
gcgcagggggctagctacaacgaacgggcgg

SEQ ID NO: 3746 - DNA, 31 bp, Artificial Sequence
  Description of Artificial Sequence:  Enzymatic Nucleic Acid
tgcgggcgggctagctacaacgaagggcacg

SEQ ID NO: 3747 - DNA, 31 bp, Artificial Sequence
  Description of Artificial Sequence:  Enzymatic Nucleic Acid
gttgcgggggctagctacaacgagcagggca

SEQ ID NO: 3748 - DNA, 31 bp, Artificial Sequence
  Description of Artificial Sequence:  Enzymatic Nucleic Acid
tcgggttgggctagctacaacgagggcgcag

SEQ ID NO: 3749 - DNA, 31 bp, Artificial Sequence
  Description of Artificial Sequence:  Enzymatic Nucleic Acid
ggctcgggggctagctacaacgatgcgggcg

SEQ ID NO: 3750 - DNA, 31 bp, Artificial Sequence
  Description of Artificial Sequence:  Enzymatic Nucleic Acid
gggtgcggggctagctacaacgatcgggttg

SEQ ID NO: 3751 - DNA, 31 bp, Artificial Sequence
  Description of Artificial Sequence:  Enzymatic Nucleic Acid
ggcgggtgggctagctacaacgaggctcggg

SEQ ID NO: 3752 - DNA, 31 bp, Artificial Sequence
  Description of Artificial Sequence:  Enzymatic Nucleic Acid
gcggcgggggctagctacaacgagcggctcg

SEQ ID NO: 3753 - DNA, 31 bp, Artificial Sequence
  Description of Artificial Sequence:  Enzymatic Nucleic Acid
gtccgcggggctagctacaacgagggtgcgg

SEQ ID NO: 3754 - DNA, 31 bp, Artificial Sequence
  Description of Artificial Sequence:  Enzymatic Nucleic Acid
tccgtccgggctagctacaacgaggcgggtg

SEQ ID NO: 3755 - DNA, 31 bp, Artificial Sequence
  Description of Artificial Sequence:  Enzymatic Nucleic Acid
gggctccgggctagctacaacgaccgcggcg

SEQ ID NO: 3756 - DNA, 31 bp, Artificial Sequence
  Description of Artificial Sequence:  Enzymatic Nucleic Acid
cgcatgggggctagctacaacgatccgtccg

SEQ ID NO: 3757 - DNA, 31 bp, Artificial Sequence
  Description of Artificial Sequence:  Enzymatic Nucleic Acid
cccgcgcaggctagctacaacgagggctccg

SEQ ID NO: 3758 - DNA, 31 bp, Artificial Sequence
  Description of Artificial Sequence:  Enzymatic Nucleic Acid
gccccgcgggctagctacaacgaatgggctc

SEQ ID NO: 3759 - DNA, 31 bp, Artificial Sequence
  Description of Artificial Sequence:  Enzymatic Nucleic Acid
tcgccccgggctagctacaacgagcatgggc

SEQ ID NO: 3760 - DNA, 31 bp, Artificial Sequence
  Description of Artificial Sequence:  Enzymatic Nucleic Acid
gcggttcgggctagctacaacgacccgcgca

SEQ ID NO: 3761 - DNA, 31 bp, Artificial Sequence
  Description of Artificial Sequence:  Enzymatic Nucleic Acid
gcgcgcggggctagctacaacgatcgccccg

SEQ ID NO: 3762 - DNA, 31 bp, Artificial Sequence
  Description of Artificial Sequence:  Enzymatic Nucleic Acid
ggggcgcgggctagctacaacgaggttcgcc

SEQ ID NO: 3763 - DNA, 31 bp, Artificial Sequence
  Description of Artificial Sequence:  Enzymatic Nucleic Acid
cgggggcgggctagctacaacgagcggttcg

SEQ ID NO: 3764 - DNA, 31 bp, Artificial Sequence
  Description of Artificial Sequence:  Enzymatic Nucleic Acid
ggcgggggggctagctacaacgagcgcggtt

SEQ ID NO: 3765 - DNA, 31 bp, Artificial Sequence
  Description of Artificial Sequence:  Enzymatic Nucleic Acid
ggcgggggggctagctacaacgagggggcgc

SEQ ID NO: 3766 - DNA, 31 bp, Artificial Sequence
  Description of Artificial Sequence:  Enzymatic Nucleic Acid
gggcggggggctagctacaacgagggggcgg

SEQ ID NO: 3767 - DNA, 31 bp, Artificial Sequence
  Description of Artificial Sequence:  Enzymatic Nucleic Acid
ggccggggggctagctacaacgaggggcggg

SEQ ID NO: 3768 - DNA, 31 bp, Artificial Sequence
  Description of Artificial Sequence:  Enzymatic Nucleic Acid
ggccgaggggctagctacaacgacggggcgg

SEQ ID NO: 3769 - DNA, 31 bp, Artificial Sequence
  Description of Artificial Sequence:  Enzymatic Nucleic Acid
ggccggggggctagctacaacgacgaggccg

SEQ ID NO: 3770 - DNA, 31 bp, Artificial Sequence
  Description of Artificial Sequence:  Enzymatic Nucleic Acid
ggccagggggctagctacaacgacggggccg

SEQ ID NO: 3771 - DNA, 31 bp, Artificial Sequence
  Description of Artificial Sequence:  Enzymatic Nucleic Acid
ccccggggggctagctacaacgacagggccg

SEQ ID NO: 3772 - DNA, 31 bp, Artificial Sequence
  Description of Artificial Sequence:  Enzymatic Nucleic Acid
cgcgactgggctagctacaacgaccccgggg

SEQ ID NO: 3773 - DNA, 31 bp, Artificial Sequence
  Description of Artificial Sequence:  Enzymatic Nucleic Acid
aggcgcgaggctagctacaacgatgcccccg

SEQ ID NO: 3774 - DNA, 31 bp, Artificial Sequence
  Description of Artificial Sequence:  Enzymatic Nucleic Acid
cacaggcgggctagctacaacgagactgccc

SEQ ID NO: 3775 - DNA, 31 bp, Artificial Sequence
  Description of Artificial Sequence:  Enzymatic Nucleic Acid
ttcacaggggctagctacaacgagcgactgc

SEQ ID NO: 3776 - DNA, 31 bp, Artificial Sequence
  Description of Artificial Sequence:  Enzymatic Nucleic Acid
accgttcaggctagctacaacgaaggcgcga

SEQ ID NO: 3777 - DNA, 31 bp, Artificial Sequence
  Description of Artificial Sequence:  Enzymatic Nucleic Acid
actcaccgggctagctacaacgatcacaggc

SEQ ID NO: 3778 - DNA, 31 bp, Artificial Sequence
  Description of Artificial Sequence:  Enzymatic Nucleic Acid
cgcactcaggctagctacaacgacgttcaca

SEQ ID NO: 3779 - DNA, 31 bp, Artificial Sequence
  Description of Artificial Sequence:  Enzymatic Nucleic Acid
tgcccgcaggctagctacaacgatcaccgtt

SEQ ID NO: 3780 - DNA, 31 bp, Artificial Sequence
  Description of Artificial Sequence:  Enzymatic Nucleic Acid
cctgcccgggctagctacaacgaactcaccg

SEQ ID NO: 3781 - DNA, 31 bp, Artificial Sequence
  Description of Artificial Sequence:  Enzymatic Nucleic Acid
gatccctgggctagctacaacgaccgcactc

SEQ ID NO: 3782 - DNA, 31 bp, Artificial Sequence
  Description of Artificial Sequence:  Enzymatic Nucleic Acid
ccggccgaggctagctacaacgaccctgccc

SEQ ID NO: 3783 - DNA, 31 bp, Artificial Sequence
  Description of Artificial Sequence:  Enzymatic Nucleic Acid
cggcccggggctagctacaacgacgatccct

SEQ ID NO: 3784 - DNA, 31 bp, Artificial Sequence
  Description of Artificial Sequence:  Enzymatic Nucleic Acid
gcgcgcggggctagctacaacgaccggccga

SEQ ID NO: 3785 - DNA, 31 bp, Artificial Sequence
  Description of Artificial Sequence:  Enzymatic Nucleic Acid
agggcgcgggctagctacaacgaggcccggc

SEQ ID NO: 3786 - DNA, 31 bp, Artificial Sequence
  Description of Artificial Sequence:  Enzymatic Nucleic Acid
ggagggcgggctagctacaacgagcggcccg

SEQ ID NO: 3787 - DNA, 31 bp, Artificial Sequence
  Description of Artificial Sequence:  Enzymatic Nucleic Acid
gaggagggggctagctacaacgagcgcggcc

SEQ ID NO: 3788 - DNA, 31 bp, Artificial Sequence
  Description of Artificial Sequence:  Enzymatic Nucleic Acid
cctgggggggctagctacaacgagaggaggg

SEQ ID NO: 3789 - DNA, 31 bp, Artificial Sequence
  Description of Artificial Sequence:  Enzymatic Nucleic Acid
tgctgccgggctagctacaacgactgggggc

SEQ ID NO: 3790 - DNA, 31 bp, Artificial Sequence
  Description of Artificial Sequence:  Enzymatic Nucleic Acid
tattgctgggctagctacaacgacgcctggg

SEQ ID NO: 3791 - DNA, 31 bp, Artificial Sequence
  Description of Artificial Sequence:  Enzymatic Nucleic Acid
gcgtattgggctagctacaacgatgccgcct

SEQ ID NO: 3792 - DNA, 31 bp, Artificial Sequence
  Description of Artificial Sequence:  Enzymatic Nucleic Acid
cgcgcgtaggctagctacaacgatgctgccg

SEQ ID NO: 3793 - DNA, 31 bp, Artificial Sequence
  Description of Artificial Sequence:  Enzymatic Nucleic Acid
gccgcgcgggctagctacaacgaattgctgc

SEQ ID NO: 3794 - DNA, 31 bp, Artificial Sequence
  Description of Artificial Sequence:  Enzymatic Nucleic Acid
gcgccgcgggctagctacaacgagtattgct

SEQ ID NO: 3795 - DNA, 31 bp, Artificial Sequence
  Description of Artificial Sequence:  Enzymatic Nucleic Acid
ccgcgccgggctagctacaacgagcgtattg

SEQ ID NO: 3796 - DNA, 31 bp, Artificial Sequence
  Description of Artificial Sequence:  Enzymatic Nucleic Acid
ggcccgcgggctagctacaacgacgcgcgta

SEQ ID NO: 3797 - DNA, 31 bp, Artificial Sequence
  Description of Artificial Sequence:  Enzymatic Nucleic Acid
ccggcccgggctagctacaacgagccgcgcg

SEQ ID NO: 3798 - DNA, 31 bp, Artificial Sequence
  Description of Artificial Sequence:  Enzymatic Nucleic Acid
gcccccggggctagctacaacgaccgcgccg

SEQ ID NO: 3799 - DNA, 31 bp, Artificial Sequence
  Description of Artificial Sequence:  Enzymatic Nucleic Acid
gccccgcgggctagctacaacgaccccggcc

SEQ ID NO: 3800 - DNA, 31 bp, Artificial Sequence
  Description of Artificial Sequence:  Enzymatic Nucleic Acid
cggccccgggctagctacaacgagcccccgg

SEQ ID NO: 3801 - DNA, 31 bp, Artificial Sequence
  Description of Artificial Sequence:  Enzymatic Nucleic Acid
cccgccggggctagctacaacgacccgcgcc

SEQ ID NO: 3802 - DNA, 31 bp, Artificial Sequence
  Description of Artificial Sequence:  Enzymatic Nucleic Acid
tacgcccgggctagctacaacgacggccccg

SEQ ID NO: 3803 - DNA, 31 bp, Artificial Sequence
  Description of Artificial Sequence:  Enzymatic Nucleic Acid
cgcttacgggctagctacaacgaccgccggc

SEQ ID NO: 3804 - DNA, 31 bp, Artificial Sequence
  Description of Artificial Sequence:  Enzymatic Nucleic Acid
gccgcttaggctagctacaacgagcccgccg

SEQ ID NO: 3805 - DNA, 31 bp, Artificial Sequence
  Description of Artificial Sequence:  Enzymatic Nucleic Acid
cgccgccgggctagctacaacgattacgccc

SEQ ID NO: 3806 - DNA, 31 bp, Artificial Sequence
  Description of Artificial Sequence:  Enzymatic Nucleic Acid
cgccgccgggctagctacaacgacgcttacg

SEQ ID NO: 3807 - DNA, 31 bp, Artificial Sequence
  Description of Artificial Sequence:  Enzymatic Nucleic Acid
cgccgccgggctagctacaacgacgccgctt

SEQ ID NO: 3808 - DNA, 31 bp, Artificial Sequence
  Description of Artificial Sequence:  Enzymatic Nucleic Acid
cgccgccgggctagctacaacgacgccgccg

SEQ ID NO: 3809 - DNA, 31 bp, Artificial Sequence
  Description of Artificial Sequence:  Enzymatic Nucleic Acid
acccgccgggctagctacaacgacgccgccg

SEQ ID NO: 3810 - DNA, 31 bp, Artificial Sequence
  Description of Artificial Sequence:  Enzymatic Nucleic Acid
cccacccgggctagctacaacgacgccgccg

SEQ ID NO: 3811 - DNA, 31 bp, Artificial Sequence
  Description of Artificial Sequence:  Enzymatic Nucleic Acid
cccacccaggctagctacaacgaccgccgcc

SEQ ID NO: 3812 - DNA, 31 bp, Artificial Sequence
  Description of Artificial Sequence:  Enzymatic Nucleic Acid
cggccccaggctagctacaacgaccacccgc

SEQ ID NO: 3813 - DNA, 31 bp, Artificial Sequence
  Description of Artificial Sequence:  Enzymatic Nucleic Acid
ccgcccggggctagctacaacgacccaccca

SEQ ID NO: 3814 - DNA, 31 bp, Artificial Sequence
  Description of Artificial Sequence:  Enzymatic Nucleic Acid
gggccccgggctagctacaacgaccggcccc

SEQ ID NO: 3815 - DNA, 31 bp, Artificial Sequence
  Description of Artificial Sequence:  Enzymatic Nucleic Acid
cccgcgggggctagctacaacgacccgcccg

SEQ ID NO: 3816 - DNA, 31 bp, Artificial Sequence
  Description of Artificial Sequence:  Enzymatic Nucleic Acid
tgtgcccgggctagctacaacgagggccccg

SEQ ID NO: 3817 - DNA, 31 bp, Artificial Sequence
  Description of Artificial Sequence:  Enzymatic Nucleic Acid
cacctgtgggctagctacaacgaccgcgggc

SEQ ID NO: 3818 - DNA, 31 bp, Artificial Sequence
  Description of Artificial Sequence:  Enzymatic Nucleic Acid
ctcacctgggctagctacaacgagcccgcgg

SEQ ID NO: 3819 - DNA, 31 bp, Artificial Sequence
  Description of Artificial Sequence:  Enzymatic Nucleic Acid
cccgctcaggctagctacaacgactgtgccc

SEQ ID NO: 3820 - DNA, 31 bp, Artificial Sequence
  Description of Artificial Sequence:  Enzymatic Nucleic Acid
gacgcccgggctagctacaacgatcacctgt

SEQ ID NO: 3821 - DNA, 31 bp, Artificial Sequence
  Description of Artificial Sequence:  Enzymatic Nucleic Acid
ccccgacgggctagctacaacgaccgctcac

SEQ ID NO: 3822 - DNA, 31 bp, Artificial Sequence
  Description of Artificial Sequence:  Enzymatic Nucleic Acid
gcccccgaggctagctacaacgagcccgctc

SEQ ID NO: 3823 - DNA, 31 bp, Artificial Sequence
  Description of Artificial Sequence:  Enzymatic Nucleic Acid
cgccgcagggctagctacaacgaccccgacg

SEQ ID NO: 3824 - DNA, 31 bp, Artificial Sequence
  Description of Artificial Sequence:  Enzymatic Nucleic Acid
gcccgccgggctagctacaacgaagcccccg

SEQ ID NO: 3825 - DNA, 31 bp, Artificial Sequence
  Description of Artificial Sequence:  Enzymatic Nucleic Acid
cccgcccgggctagctacaacgacgcagccc

SEQ ID NO: 3826 - DNA, 31 bp, Artificial Sequence
  Description of Artificial Sequence:  Enzymatic Nucleic Acid
ggcccccgggctagctacaacgaccgccgca

SEQ ID NO: 3827 - DNA, 31 bp, Artificial Sequence
  Description of Artificial Sequence:  Enzymatic Nucleic Acid
ggaaggggggctagctacaacgaccccgccc

SEQ ID NO: 3828 - DNA, 31 bp, Artificial Sequence
  Description of Artificial Sequence:  Enzymatic Nucleic Acid
cccgcaggggctagctacaacgacccaggga

SEQ ID NO: 3829 - DNA, 31 bp, Artificial Sequence
  Description of Artificial Sequence:  Enzymatic Nucleic Acid
gattcccgggctagctacaacgaaggcccca

SEQ ID NO: 3830 - DNA, 31 bp, Artificial Sequence
  Description of Artificial Sequence:  Enzymatic Nucleic Acid
ggcccggaggctagctacaacgatcccgcag

SEQ ID NO: 3831 - DNA, 31 bp, Artificial Sequence
  Description of Artificial Sequence:  Enzymatic Nucleic Acid
gggtggggggctagctacaacgaccggattc

SEQ ID NO: 3832 - DNA, 31 bp, Artificial Sequence
  Description of Artificial Sequence:  Enzymatic Nucleic Acid
gccacgggggctagctacaacgaggggcccg

SEQ ID NO: 3833 - DNA, 31 bp, Artificial Sequence
  Description of Artificial Sequence:  Enzymatic Nucleic Acid
cgaggccaggctagctacaacgagggtgggg

SEQ ID NO: 3834 - DNA, 31 bp, Artificial Sequence
  Description of Artificial Sequence:  Enzymatic Nucleic Acid
gcgcgaggggctagctacaacgacacgggtg

SEQ ID NO: 3835 - DNA, 31 bp, Artificial Sequence
  Description of Artificial Sequence:  Enzymatic Nucleic Acid
gcccagcgggctagctacaacgagaggccac

SEQ ID NO: 3836 - DNA, 31 bp, Artificial Sequence
  Description of Artificial Sequence:  Enzymatic Nucleic Acid
gtgcccagggctagctacaacgagcgaggcc

SEQ ID NO: 3837 - DNA, 31 bp, Artificial Sequence
  Description of Artificial Sequence:  Enzymatic Nucleic Acid
ggaccgtgggctagctacaacgaccagcgcg

SEQ ID NO: 3838 - DNA, 31 bp, Artificial Sequence
  Description of Artificial Sequence:  Enzymatic Nucleic Acid
ggggaccgggctagctacaacgagcccagcg

SEQ ID NO: 3839 - DNA, 31 bp, Artificial Sequence
  Description of Artificial Sequence:  Enzymatic Nucleic Acid
cgtggggaggctagctacaacgacgtgccca

SEQ ID NO: 3840 - DNA, 31 bp, Artificial Sequence
  Description of Artificial Sequence:  Enzymatic Nucleic Acid
cgccggcgggctagctacaacgaggggaccg

SEQ ID NO: 3841 - DNA, 31 bp, Artificial Sequence
  Description of Artificial Sequence:  Enzymatic Nucleic Acid
tacgccggggctagctacaacgagtggggac

SEQ ID NO: 3842 - DNA, 31 bp, Artificial Sequence
  Description of Artificial Sequence:  Enzymatic Nucleic Acid
cgggtacgggctagctacaacgacggcgtgg

SEQ ID NO: 3843 - DNA, 31 bp, Artificial Sequence
  Description of Artificial Sequence:  Enzymatic Nucleic Acid
cccgggtaggctagctacaacgagccggcgt

SEQ ID NO: 3844 - DNA, 31 bp, Artificial Sequence
  Description of Artificial Sequence:  Enzymatic Nucleic Acid
ctcccgggggctagctacaacgaacgccggc

SEQ ID NO: 3845 - DNA, 31 bp, Artificial Sequence
  Description of Artificial Sequence:  Enzymatic Nucleic Acid
gcccgaggggctagctacaacgatcccgggt

SEQ ID NO: 3846 - DNA, 31 bp, Artificial Sequence
  Description of Artificial Sequence:  Enzymatic Nucleic Acid
gcgccgggggctagctacaacgaccgaggct

SEQ ID NO: 3847 - DNA, 31 bp, Artificial Sequence
  Description of Artificial Sequence:  Enzymatic Nucleic Acid
tgagggcgggctagctacaacgacgggcccg

SEQ ID NO: 3848 - DNA, 31 bp, Artificial Sequence
  Description of Artificial Sequence:  Enzymatic Nucleic Acid
tgtgagggggctagctacaacgagccgggcc

SEQ ID NO: 3849 - DNA, 31 bp, Artificial Sequence
  Description of Artificial Sequence:  Enzymatic Nucleic Acid
cccgggtgggctagctacaacgagagggcgc

SEQ ID NO: 3850 - DNA, 31 bp, Artificial Sequence
  Description of Artificial Sequence:  Enzymatic Nucleic Acid
cccccgggggctagctacaacgagtgagggc

SEQ ID NO: 3851 - DNA, 31 bp, Artificial Sequence
  Description of Artificial Sequence:  Enzymatic Nucleic Acid
cccagacgggctagctacaacgaccccgggt

SEQ ID NO: 3852 - DNA, 31 bp, Artificial Sequence
  Description of Artificial Sequence:  Enzymatic Nucleic Acid
ctcccagaggctagctacaacgagcccccgg

SEQ ID NO: 3853 - DNA, 31 bp, Artificial Sequence
  Description of Artificial Sequence:  Enzymatic Nucleic Acid
cgcggccgggctagctacaacgactcctccc

SEQ ID NO: 3854 - DNA, 31 bp, Artificial Sequence
  Description of Artificial Sequence:  Enzymatic Nucleic Acid
ggccgcggggctagctacaacgacgcctcct

SEQ ID NO: 3855 - DNA, 31 bp, Artificial Sequence
  Description of Artificial Sequence:  Enzymatic Nucleic Acid
cgtggccgggctagctacaacgaggccgcct

SEQ ID NO: 3856 - DNA, 31 bp, Artificial Sequence
  Description of Artificial Sequence:  Enzymatic Nucleic Acid
tgccgtggggctagctacaacgacgcggccg

SEQ ID NO: 3857 - DNA, 31 bp, Artificial Sequence
  Description of Artificial Sequence:  Enzymatic Nucleic Acid
gcgtgccgggctagctacaacgaggccgcgg

SEQ ID NO: 3858 - DNA, 31 bp, Artificial Sequence
  Description of Artificial Sequence:  Enzymatic Nucleic Acid
cgggcgtgggctagctacaacgacgtggccg

SEQ ID NO: 3859 - DNA, 31 bp, Artificial Sequence
  Description of Artificial Sequence:  Enzymatic Nucleic Acid
cccgggcgggctagctacaacgagccgtggc

SEQ ID NO: 3860 - DNA, 31 bp, Artificial Sequence
  Description of Artificial Sequence:  Enzymatic Nucleic Acid
tgcccgggggctagctacaacgagtgccgtg

SEQ ID NO: 3861 - DNA, 31 bp, Artificial Sequence
  Description of Artificial Sequence:  Enzymatic Nucleic Acid
cgggggtgggctagctacaacgaccgggcgt

SEQ ID NO: 3862 - DNA, 31 bp, Artificial Sequence
  Description of Artificial Sequence:  Enzymatic Nucleic Acid
atcgggggggctagctacaacgagcccgggc

SEQ ID NO: 3863 - DNA, 31 bp, Artificial Sequence
  Description of Artificial Sequence:  Enzymatic Nucleic Acid
atgctgaaggctagctacaacgacgggggtg

SEQ ID NO: 3864 - DNA, 31 bp, Artificial Sequence
  Description of Artificial Sequence:  Enzymatic Nucleic Acid
ctgtgatgggctagctacaacgatgaatcgg

SEQ ID NO: 3865 - DNA, 31 bp, Artificial Sequence
  Description of Artificial Sequence:  Enzymatic Nucleic Acid
acctgtgaggctagctacaacgagctgaatc

SEQ ID NO: 3866 - DNA, 31 bp, Artificial Sequence
  Description of Artificial Sequence:  Enzymatic Nucleic Acid
gcgacctgggctagctacaacgagatgctga

SEQ ID NO: 3867 - DNA, 31 bp, Artificial Sequence
  Description of Artificial Sequence:  Enzymatic Nucleic Acid
gtccgcgaggctagctacaacgactgtgatg

SEQ ID NO: 3868 - DNA, 31 bp, Artificial Sequence
  Description of Artificial Sequence:  Enzymatic Nucleic Acid
ctggtccgggctagctacaacgagacctgtg

SEQ ID NO: 3869 - DNA, 31 bp, Artificial Sequence
  Description of Artificial Sequence:  Enzymatic Nucleic Acid
cggcctggggctagctacaacgaccgcgacc

SEQ ID NO: 3870 - DNA, 31 bp, Artificial Sequence
  Description of Artificial Sequence:  Enzymatic Nucleic Acid
gcccccggggctagctacaacgactggtccg

SEQ ID NO: 3871 - DNA, 31 bp, Artificial Sequence
  Description of Artificial Sequence:  Enzymatic Nucleic Acid
ggctgaggggctagctacaacgaccccggcc

SEQ ID NO: 3872 - DNA, 31 bp, Artificial Sequence
  Description of Artificial Sequence:  Enzymatic Nucleic Acid
cactggggggctagctacaacgatgaggccc

SEQ ID NO: 3873 - DNA, 31 bp, Artificial Sequence
  Description of Artificial Sequence:  Enzymatic Nucleic Acid
aaaaggcaggctagctacaacgatggggctg

SEQ ID NO: 3874 - DNA, 31 bp, Artificial Sequence
  Description of Artificial Sequence:  Enzymatic Nucleic Acid
ggaaaaggggctagctacaacgaactggggc

SEQ ID NO: 3875 - DNA, 31 bp, Artificial Sequence
  Description of Artificial Sequence:  Enzymatic Nucleic Acid
gcgggagaggctagctacaacgaccggagag

SEQ ID NO: 3876 - DNA, 31 bp, Artificial Sequence
  Description of Artificial Sequence:  Enzymatic Nucleic Acid
aagcggcgggctagctacaacgagggagacc

SEQ ID NO: 3877 - DNA, 31 bp, Artificial Sequence
  Description of Artificial Sequence:  Enzymatic Nucleic Acid
agaagcggggctagctacaacgagcgggaga

SEQ ID NO: 3878 - DNA, 31 bp, Artificial Sequence
  Description of Artificial Sequence:  Enzymatic Nucleic Acid
ccgagaagggctagctacaacgaggcgcggg

SEQ ID NO: 3879 - DNA, 31 bp, Artificial Sequence
  Description of Artificial Sequence:  Enzymatic Nucleic Acid
ggaaggggggctagctacaacgacgagaagc

SEQ ID NO: 3880 - DNA, 31 bp, Artificial Sequence
  Description of Artificial Sequence:  Enzymatic Nucleic Acid
ctgagcgaggctagctacaacgaaggaaggg

SEQ ID NO: 3881 - DNA, 31 bp, Artificial Sequence
  Description of Artificial Sequence:  Enzymatic Nucleic Acid
ggactgagggctagctacaacgagacaggaa

SEQ ID NO: 3882 - DNA, 31 bp, Artificial Sequence
  Description of Artificial Sequence:  Enzymatic Nucleic Acid
agcagggaggctagctacaacgatgagcgac

SEQ ID NO: 3883 - DNA, 31 bp, Artificial Sequence
  Description of Artificial Sequence:  Enzymatic Nucleic Acid
ctgggaagggctagctacaacgaagggactg

SEQ ID NO: 3884 - DNA, 31 bp, Artificial Sequence
  Description of Artificial Sequence:  Enzymatic Nucleic Acid
cagaggagggctagctacaacgatcctggga

SEQ ID NO: 3885 - DNA, 31 bp, Artificial Sequence
  Description of Artificial Sequence:  Enzymatic Nucleic Acid
ggagaagaggctagctacaacgaagaggagc

SEQ ID NO: 3886 - DNA, 31 bp, Artificial Sequence
  Description of Artificial Sequence:  Enzymatic Nucleic Acid
acagaaagggctagctacaacgatggagaag

SEQ ID NO: 3887 - DNA, 31 bp, Artificial Sequence
  Description of Artificial Sequence:  Enzymatic Nucleic Acid
ttcagccaggctagctacaacgaagaaagct

SEQ ID NO: 3888 - DNA, 31 bp, Artificial Sequence
  Description of Artificial Sequence:  Enzymatic Nucleic Acid
tctttcagggctagctacaacgacacagaaa

SEQ ID NO: 3889 - DNA, 31 bp, Artificial Sequence
  Description of Artificial Sequence:  Enzymatic Nucleic Acid
cgggggcaggctagctacaacgactttcagc

SEQ ID NO: 3890 - DNA, 31 bp, Artificial Sequence
  Description of Artificial Sequence:  Enzymatic Nucleic Acid
accgggggggctagctacaacgaatctttca

SEQ ID NO: 3891 - DNA, 31 bp, Artificial Sequence
  Description of Artificial Sequence:  Enzymatic Nucleic Acid
gcggggaaggctagctacaacgacgggggca

SEQ ID NO: 3892 - DNA, 31 bp, Artificial Sequence
  Description of Artificial Sequence:  Enzymatic Nucleic Acid
acccccggggctagctacaacgaggggaacc

SEQ ID NO: 3893 - DNA, 31 bp, Artificial Sequence
  Description of Artificial Sequence:  Enzymatic Nucleic Acid
gccccgcaggctagctacaacgaccccggcg

SEQ ID NO: 3894 - DNA, 31 bp, Artificial Sequence
  Description of Artificial Sequence:  Enzymatic Nucleic Acid
gcgccccgggctagctacaacgaacccccgg

SEQ ID NO: 3895 - DNA, 31 bp, Artificial Sequence
  Description of Artificial Sequence:  Enzymatic Nucleic Acid
gggcagcgggctagctacaacgacccgcacc

SEQ ID NO: 3896 - DNA, 31 bp, Artificial Sequence
  Description of Artificial Sequence:  Enzymatic Nucleic Acid
ccgggcagggctagctacaacgagccccgca

SEQ ID NO: 3897 - DNA, 31 bp, Artificial Sequence
  Description of Artificial Sequence:  Enzymatic Nucleic Acid
gacccgggggctagctacaacgaagcgcccc

SEQ ID NO: 3898 - DNA, 31 bp, Artificial Sequence
  Description of Artificial Sequence:  Enzymatic Nucleic Acid
agggcagaggctagctacaacgaccgggcag

SEQ ID NO: 3899 - DNA, 31 bp, Artificial Sequence
  Description of Artificial Sequence:  Enzymatic Nucleic Acid
ggggagggggctagctacaacgaagacccgg

SEQ ID NO: 3900 - DNA, 31 bp, Artificial Sequence
  Description of Artificial Sequence:  Enzymatic Nucleic Acid
aggcgccgggctagctacaacgacgagggga

SEQ ID NO: 3901 - DNA, 31 bp, Artificial Sequence
  Description of Artificial Sequence:  Enzymatic Nucleic Acid
actaggcgggctagctacaacgacgccgagg

SEQ ID NO: 3902 - DNA, 31 bp, Artificial Sequence
  Description of Artificial Sequence:  Enzymatic Nucleic Acid
gtactaggggctagctacaacgagccgccga

SEQ ID NO: 3903 - DNA, 31 bp, Artificial Sequence
  Description of Artificial Sequence:  Enzymatic Nucleic Acid
actgcgtaggctagctacaacgataggcgcc

SEQ ID NO: 3904 - DNA, 31 bp, Artificial Sequence
  Description of Artificial Sequence:  Enzymatic Nucleic Acid
ctactgcgggctagctacaacgaactaggcg

SEQ ID NO: 3905 - DNA, 31 bp, Artificial Sequence
  Description of Artificial Sequence:  Enzymatic Nucleic Acid
gcctactgggctagctacaacgagtactagg

SEQ ID NO: 3906 - DNA, 31 bp, Artificial Sequence
  Description of Artificial Sequence:  Enzymatic Nucleic Acid
agcgcctaggctagctacaacgatgcgtact

SEQ ID NO: 3907 - DNA, 31 bp, Artificial Sequence
  Description of Artificial Sequence:  Enzymatic Nucleic Acid
gctgagcgggctagctacaacgactactgcg

SEQ ID NO: 3908 - DNA, 31 bp, Artificial Sequence
  Description of Artificial Sequence:  Enzymatic Nucleic Acid
ttgctgagggctagctacaacgagcctactg

SEQ ID NO: 3909 - DNA, 31 bp, Artificial Sequence
  Description of Artificial Sequence:  Enzymatic Nucleic Acid
agtatttgggctagctacaacgatgagcgcc

SEQ ID NO: 3910 - DNA, 31 bp, Artificial Sequence
  Description of Artificial Sequence:  Enzymatic Nucleic Acid
gacaagtaggctagctacaacgattgctgag

SEQ ID NO: 3911 - DNA, 31 bp, Artificial Sequence
  Description of Artificial Sequence:  Enzymatic Nucleic Acid
ccgacaagggctagctacaacgaatttgctg

SEQ ID NO: 3912 - DNA, 31 bp, Artificial Sequence
  Description of Artificial Sequence:  Enzymatic Nucleic Acid
gcctccgaggctagctacaacgaaagtattt

SEQ ID NO: 3913 - DNA, 31 bp, Artificial Sequence
  Description of Artificial Sequence:  Enzymatic Nucleic Acid
cgctggtgggctagctacaacgactccgaca

SEQ ID NO: 3914 - DNA, 31 bp, Artificial Sequence
  Description of Artificial Sequence:  Enzymatic Nucleic Acid
ggcgctggggctagctacaacgagcctccga

SEQ ID NO: 3915 - DNA, 31 bp, Artificial Sequence
  Description of Artificial Sequence:  Enzymatic Nucleic Acid
ccgcggcgggctagctacaacgatggtgcct

SEQ ID NO: 3916 - DNA, 31 bp, Artificial Sequence
  Description of Artificial Sequence:  Enzymatic Nucleic Acid
ccccgcggggctagctacaacgagctggtgc

SEQ ID NO: 3917 - DNA, 31 bp, Artificial Sequence
  Description of Artificial Sequence:  Enzymatic Nucleic Acid
aggccccgggctagctacaacgaggcgctgg

SEQ ID NO: 3918 - DNA, 31 bp, Artificial Sequence
  Description of Artificial Sequence:  Enzymatic Nucleic Acid
cctgcaggggctagctacaacgacccgcggc

SEQ ID NO: 3919 - DNA, 31 bp, Artificial Sequence
  Description of Artificial Sequence:  Enzymatic Nucleic Acid
ccagcctgggctagctacaacgaaggccccg

SEQ ID NO: 3920 - DNA, 31 bp, Artificial Sequence
  Description of Artificial Sequence:  Enzymatic Nucleic Acid
agtgccagggctagctacaacgactgcaggc

SEQ ID NO: 3921 - DNA, 31 bp, Artificial Sequence
  Description of Artificial Sequence:  Enzymatic Nucleic Acid
ggctagtgggctagctacaacgacagcctgc

SEQ ID NO: 3922 - DNA, 31 bp, Artificial Sequence
  Description of Artificial Sequence:  Enzymatic Nucleic Acid
caggctagggctagctacaacgagccagcct

SEQ ID NO: 3923 - DNA, 31 bp, Artificial Sequence
  Description of Artificial Sequence:  Enzymatic Nucleic Acid
cgggcaggggctagctacaacgatagtgcca

SEQ ID NO: 3924 - DNA, 31 bp, Artificial Sequence
  Description of Artificial Sequence:  Enzymatic Nucleic Acid
tgcccgggggctagctacaacgaaggctagt

SEQ ID NO: 3925 - DNA, 31 bp, Artificial Sequence
  Description of Artificial Sequence:  Enzymatic Nucleic Acid
acggcgtgggctagctacaacgaccgggcag

SEQ ID NO: 3926 - DNA, 31 bp, Artificial Sequence
  Description of Artificial Sequence:  Enzymatic Nucleic Acid
ccacggcgggctagctacaacgagcccgggc

SEQ ID NO: 3927 - DNA, 31 bp, Artificial Sequence
  Description of Artificial Sequence:  Enzymatic Nucleic Acid
cgccacggggctagctacaacgagtgcccgg

SEQ ID NO: 3928 - DNA, 31 bp, Artificial Sequence
  Description of Artificial Sequence:  Enzymatic Nucleic Acid
gcgcgccaggctagctacaacgaggcgtgcc

SEQ ID NO: 3929 - DNA, 31 bp, Artificial Sequence
  Description of Artificial Sequence:  Enzymatic Nucleic Acid
ggagcgcgggctagctacaacgacacggcgt

SEQ ID NO: 3930 - DNA, 31 bp, Artificial Sequence
  Description of Artificial Sequence:  Enzymatic Nucleic Acid
gcggagcgggctagctacaacgagccacggc

SEQ ID NO: 3931 - DNA, 31 bp, Artificial Sequence
  Description of Artificial Sequence:  Enzymatic Nucleic Acid
cggcggagggctagctacaacgagcgccacg

SEQ ID NO: 3932 - DNA, 31 bp, Artificial Sequence
  Description of Artificial Sequence:  Enzymatic Nucleic Acid
ggccacggggctagctacaacgaggagcgcg

SEQ ID NO: 3933 - DNA, 31 bp, Artificial Sequence
  Description of Artificial Sequence:  Enzymatic Nucleic Acid
tctggccaggctagctacaacgaggcggagc

SEQ ID NO: 3934 - DNA, 31 bp, Artificial Sequence
  Description of Artificial Sequence:  Enzymatic Nucleic Acid
aggtctggggctagctacaacgacacggcgg

SEQ ID NO: 3935 - DNA, 31 bp, Artificial Sequence
  Description of Artificial Sequence:  Enzymatic Nucleic Acid
agaacaggggctagctacaacgactggccac

SEQ ID NO: 3936 - DNA, 31 bp, Artificial Sequence
  Description of Artificial Sequence:  Enzymatic Nucleic Acid
ctccagaaggctagctacaacgaaggtctgg

SEQ ID NO: 3937 - DNA, 31 bp, Artificial Sequence
  Description of Artificial Sequence:  Enzymatic Nucleic Acid
ggttaccgggctagctacaacgacctccaga

SEQ ID NO: 3938 - DNA, 31 bp, Artificial Sequence
  Description of Artificial Sequence:  Enzymatic Nucleic Acid
tgaggttaggctagctacaacgacgtcctcc

SEQ ID NO: 3939 - DNA, 31 bp, Artificial Sequence
  Description of Artificial Sequence:  Enzymatic Nucleic Acid
ggctgaggggctagctacaacgataccgtcc

SEQ ID NO: 3940 - DNA, 31 bp, Artificial Sequence
  Description of Artificial Sequence:  Enzymatic Nucleic Acid
cccgagggggctagctacaacgatgaggtta

SEQ ID NO: 3941 - DNA, 31 bp, Artificial Sequence
  Description of Artificial Sequence:  Enzymatic Nucleic Acid
gggaggcgggctagctacaacgaccgagggc

SEQ ID NO: 3942 - DNA, 31 bp, Artificial Sequence
  Description of Artificial Sequence:  Enzymatic Nucleic Acid
aagggaggggctagctacaacgagcccgagg

SEQ ID NO: 3943 - DNA, 31 bp, Artificial Sequence
  Description of Artificial Sequence:  Enzymatic Nucleic Acid
cagaaaggggctagctacaacgataaaggga

SEQ ID NO: 3944 - DNA, 31 bp, Artificial Sequence
  Description of Artificial Sequence:  Enzymatic Nucleic Acid
tgggtcggggctagctacaacgaagaaaggc

SEQ ID NO: 3945 - DNA, 31 bp, Artificial Sequence
  Description of Artificial Sequence:  Enzymatic Nucleic Acid
ctgctgggggctagctacaacgacggcagaa

SEQ ID NO: 3946 - DNA, 31 bp, Artificial Sequence
  Description of Artificial Sequence:  Enzymatic Nucleic Acid
agaagctgggctagctacaacgatgggtcgg

SEQ ID NO: 3947 - DNA, 31 bp, Artificial Sequence
  Description of Artificial Sequence:  Enzymatic Nucleic Acid
attagaagggctagctacaacgatgctgggt

SEQ ID NO: 3948 - DNA, 31 bp, Artificial Sequence
  Description of Artificial Sequence:  Enzymatic Nucleic Acid
cacccaaaggctagctacaacgatagaagct

SEQ ID NO: 3949 - DNA, 31 bp, Artificial Sequence
  Description of Artificial Sequence:  Enzymatic Nucleic Acid
accacgcaggctagctacaacgaccaaatta

SEQ ID NO: 3950 - DNA, 31 bp, Artificial Sequence
  Description of Artificial Sequence:  Enzymatic Nucleic Acid
caaccacgggctagctacaacgaacccaaat

SEQ ID NO: 3951 - DNA, 31 bp, Artificial Sequence
  Description of Artificial Sequence:  Enzymatic Nucleic Acid
ctcaaccaggctagctacaacgagcacccaa

SEQ ID NO: 3952 - DNA, 31 bp, Artificial Sequence
  Description of Artificial Sequence:  Enzymatic Nucleic Acid
gctctcaaggctagctacaacgacacgcacc

SEQ ID NO: 3953 - DNA, 31 bp, Artificial Sequence
  Description of Artificial Sequence:  Enzymatic Nucleic Acid
gctgagcgggctagctacaacgatctcaacc

SEQ ID NO: 3954 - DNA, 31 bp, Artificial Sequence
  Description of Artificial Sequence:  Enzymatic Nucleic Acid
cagctgagggctagctacaacgagctctcaa

SEQ ID NO: 3955 - DNA, 31 bp, Artificial Sequence
  Description of Artificial Sequence:  Enzymatic Nucleic Acid
gctgacagggctagctacaacgatgagcgct

SEQ ID NO: 3956 - DNA, 31 bp, Artificial Sequence
  Description of Artificial Sequence:  Enzymatic Nucleic Acid
agggctgaggctagctacaacgaagctgagc

SEQ ID NO: 3957 - DNA, 31 bp, Artificial Sequence
  Description of Artificial Sequence:  Enzymatic Nucleic Acid
aggcagggggctagctacaacgatgacagct

SEQ ID NO: 3958 - DNA, 31 bp, Artificial Sequence
  Description of Artificial Sequence:  Enzymatic Nucleic Acid
ctcaaaggggctagctacaacgaagggctga

SEQ ID NO: 3959 - DNA, 31 bp, Artificial Sequence
  Description of Artificial Sequence:  Enzymatic Nucleic Acid
ggacccagggctagctacaacgacctcaaag

SEQ ID NO: 3960 - DNA, 31 bp, Artificial Sequence
  Description of Artificial Sequence:  Enzymatic Nucleic Acid
aaaagggaggctagctacaacgaccagccct

SEQ ID NO: 3961 - DNA, 31 bp, Artificial Sequence
  Description of Artificial Sequence:  Enzymatic Nucleic Acid
cccagtgaggctagctacaacgagggaaaag

SEQ ID NO: 3962 - DNA, 31 bp, Artificial Sequence
  Description of Artificial Sequence:  Enzymatic Nucleic Acid
tgacccagggctagctacaacgagatgggaa

SEQ ID NO: 3963 - DNA, 31 bp, Artificial Sequence
  Description of Artificial Sequence:  Enzymatic Nucleic Acid
cttaatgaggctagctacaacgaccagtgat

SEQ ID NO: 3964 - DNA, 31 bp, Artificial Sequence
  Description of Artificial Sequence:  Enzymatic Nucleic Acid
gctcttaaggctagctacaacgagacccagt

SEQ ID NO: 3965 - DNA, 31 bp, Artificial Sequence
  Description of Artificial Sequence:  Enzymatic Nucleic Acid
cccacttgggctagctacaacgatcttaatg

SEQ ID NO: 3966 - DNA, 31 bp, Artificial Sequence
  Description of Artificial Sequence:  Enzymatic Nucleic Acid
cgcccccaggctagctacaacgattgctctt

SEQ ID NO: 3967 - DNA, 31 bp, Artificial Sequence
  Description of Artificial Sequence:  Enzymatic Nucleic Acid
tcgcctcgggctagctacaacgaccccactt

SEQ ID NO: 3968 - DNA, 31 bp, Artificial Sequence
  Description of Artificial Sequence:  Enzymatic Nucleic Acid
ggctgtcgggctagctacaacgactcgcccc

SEQ ID NO: 3969 - DNA, 31 bp, Artificial Sequence
  Description of Artificial Sequence:  Enzymatic Nucleic Acid
gagggctgggctagctacaacgacgcctcgc

SEQ ID NO: 3970 - DNA, 31 bp, Artificial Sequence
  Description of Artificial Sequence:  Enzymatic Nucleic Acid
cgggagggggctagctacaacgatgtcgcct

SEQ ID NO: 3971 - DNA, 31 bp, Artificial Sequence
  Description of Artificial Sequence:  Enzymatic Nucleic Acid
ccagcgtgggctagctacaacgagggagggc

SEQ ID NO: 3972 - DNA, 31 bp, Artificial Sequence
  Description of Artificial Sequence:  Enzymatic Nucleic Acid
acccagcgggctagctacaacgagcgggagg

SEQ ID NO: 3973 - DNA, 31 bp, Artificial Sequence
  Description of Artificial Sequence:  Enzymatic Nucleic Acid
caacccagggctagctacaacgagtgcggga

SEQ ID NO: 3974 - DNA, 31 bp, Artificial Sequence
  Description of Artificial Sequence:  Enzymatic Nucleic Acid
agctgcaaggctagctacaacgaccagcgtg

SEQ ID NO: 3975 - DNA, 31 bp, Artificial Sequence
  Description of Artificial Sequence:  Enzymatic Nucleic Acid
tgcagctgggctagctacaacgaaacccagc

SEQ ID NO: 3976 - DNA, 31 bp, Artificial Sequence
  Description of Artificial Sequence:  Enzymatic Nucleic Acid
ctgtgcagggctagctacaacgatgcaaccc

SEQ ID NO: 3977 - DNA, 31 bp, Artificial Sequence
  Description of Artificial Sequence:  Enzymatic Nucleic Acid
tacctgtgggctagctacaacgaagctgcaa

SEQ ID NO: 3978 - DNA, 31 bp, Artificial Sequence
  Description of Artificial Sequence:  Enzymatic Nucleic Acid
cctacctgggctagctacaacgagcagctgc

SEQ ID NO: 3979 - DNA, 31 bp, Artificial Sequence
  Description of Artificial Sequence:  Enzymatic Nucleic Acid
cgtgcctaggctagctacaacgactgtgcag

SEQ ID NO: 3980 - DNA, 31 bp, Artificial Sequence
  Description of Artificial Sequence:  Enzymatic Nucleic Acid
gcagcgtgggctagctacaacgactacctgt

SEQ ID NO: 3981 - DNA, 31 bp, Artificial Sequence
  Description of Artificial Sequence:  Enzymatic Nucleic Acid
ctgcagcgggctagctacaacgagcctacct

SEQ ID NO: 3982 - DNA, 31 bp, Artificial Sequence
  Description of Artificial Sequence:  Enzymatic Nucleic Acid
gactgcagggctagctacaacgagtgcctac

SEQ ID NO: 3983 - DNA, 31 bp, Artificial Sequence
  Description of Artificial Sequence:  Enzymatic Nucleic Acid
aaggactgggctagctacaacgaagcgtgcc

SEQ ID NO: 3984 - DNA, 31 bp, Artificial Sequence
  Description of Artificial Sequence:  Enzymatic Nucleic Acid
agcaaggaggctagctacaacgatgcagcgt

SEQ ID NO: 3985 - DNA, 31 bp, Artificial Sequence
  Description of Artificial Sequence:  Enzymatic Nucleic Acid
ccaggcagggctagctacaacgaaaggactg

SEQ ID NO: 3986 - DNA, 31 bp, Artificial Sequence
  Description of Artificial Sequence:  Enzymatic Nucleic Acid
acgccaggggctagctacaacgaagcaagga

SEQ ID NO: 3987 - DNA, 31 bp, Artificial Sequence
  Description of Artificial Sequence:  Enzymatic Nucleic Acid
ccccaacgggctagctacaacgacaggcagc

SEQ ID NO: 3988 - DNA, 31 bp, Artificial Sequence
  Description of Artificial Sequence:  Enzymatic Nucleic Acid
ggccccaaggctagctacaacgagccaggca

SEQ ID NO: 3989 - DNA, 31 bp, Artificial Sequence
  Description of Artificial Sequence:  Enzymatic Nucleic Acid
tccctgggggctagctacaacgacccaacgc

SEQ ID NO: 3990 - DNA, 31 bp, Artificial Sequence
  Description of Artificial Sequence:  Enzymatic Nucleic Acid
cacagcggggctagctacaacgaccctgggc

SEQ ID NO: 3991 - DNA, 31 bp, Artificial Sequence
  Description of Artificial Sequence:  Enzymatic Nucleic Acid
acccacagggctagctacaacgaggtccctg

SEQ ID NO: 3992 - DNA, 31 bp, Artificial Sequence
  Description of Artificial Sequence:  Enzymatic Nucleic Acid
caaacccaggctagctacaacgaagcggtcc

SEQ ID NO: 3993 - DNA, 31 bp, Artificial Sequence
  Description of Artificial Sequence:  Enzymatic Nucleic Acid
agggcaaaggctagctacaacgaccacagcg

SEQ ID NO: 3994 - DNA, 31 bp, Artificial Sequence
  Description of Artificial Sequence:  Enzymatic Nucleic Acid
ctgaagggggctagctacaacgaaaacccac

SEQ ID NO: 3995 - DNA, 31 bp, Artificial Sequence
  Description of Artificial Sequence:  Enzymatic Nucleic Acid
cagggccaggctagctacaacgactgaaggg

SEQ ID NO: 3996 - DNA, 31 bp, Artificial Sequence
  Description of Artificial Sequence:  Enzymatic Nucleic Acid
tggcagggggctagctacaacgacatctgaa

SEQ ID NO: 3997 - DNA, 31 bp, Artificial Sequence
  Description of Artificial Sequence:  Enzymatic Nucleic Acid
gctgctggggctagctacaacgaagggccat

SEQ ID NO: 3998 - DNA, 31 bp, Artificial Sequence
  Description of Artificial Sequence:  Enzymatic Nucleic Acid
ggcagctgggctagctacaacgatggcaggg

SEQ ID NO: 3999 - DNA, 31 bp, Artificial Sequence
  Description of Artificial Sequence:  Enzymatic Nucleic Acid
cagggcagggctagctacaacgatgctggca

SEQ ID NO: 4000 - DNA, 31 bp, Artificial Sequence
  Description of Artificial Sequence:  Enzymatic Nucleic Acid
ccacagggggctagctacaacgaagctgctg

SEQ ID NO: 4001 - DNA, 31 bp, Artificial Sequence
  Description of Artificial Sequence:  Enzymatic Nucleic Acid
aggccccaggctagctacaacgaagggcagc

SEQ ID NO: 4002 - DNA, 31 bp, Artificial Sequence
  Description of Artificial Sequence:  Enzymatic Nucleic Acid
gccccaggggctagctacaacgacccacagg

SEQ ID NO: 4003 - DNA, 31 bp, Artificial Sequence
  Description of Artificial Sequence:  Enzymatic Nucleic Acid
aggcccagggctagctacaacgacccaggcc

SEQ ID NO: 4004 - DNA, 31 bp, Artificial Sequence
  Description of Artificial Sequence:  Enzymatic Nucleic Acid
ggcccaggggctagctacaacgaccagcccc

SEQ ID NO: 4005 - DNA, 31 bp, Artificial Sequence
  Description of Artificial Sequence:  Enzymatic Nucleic Acid
cagccaggggctagctacaacgaccaggccc

SEQ ID NO: 4006 - DNA, 31 bp, Artificial Sequence
  Description of Artificial Sequence:  Enzymatic Nucleic Acid
ctgctcagggctagctacaacgacaggccca

SEQ ID NO: 4007 - DNA, 31 bp, Artificial Sequence
  Description of Artificial Sequence:  Enzymatic Nucleic Acid
gggccctgggctagctacaacgatcagccag

SEQ ID NO: 4008 - DNA, 31 bp, Artificial Sequence
  Description of Artificial Sequence:  Enzymatic Nucleic Acid
aaggagggggctagctacaacgacctgctca

SEQ ID NO: 4009 - DNA, 31 bp, Artificial Sequence
  Description of Artificial Sequence:  Enzymatic Nucleic Acid
cccacctgggctagctacaacgacaaggagg

SEQ ID NO: 4010 - DNA, 31 bp, Artificial Sequence
  Description of Artificial Sequence:  Enzymatic Nucleic Acid
ctgccccaggctagctacaacgactgccaag

SEQ ID NO: 4011 - DNA, 31 bp, Artificial Sequence
  Description of Artificial Sequence:  Enzymatic Nucleic Acid
gtctcctgggctagctacaacgacccacctg

SEQ ID NO: 4012 - DNA, 31 bp, Artificial Sequence
  Description of Artificial Sequence:  Enzymatic Nucleic Acid
ctacagggggctagctacaacgactcctgcc

SEQ ID NO: 4013 - DNA, 31 bp, Artificial Sequence
  Description of Artificial Sequence:  Enzymatic Nucleic Acid
tcctcctaggctagctacaacgaagggtctc

SEQ ID NO: 4014 - DNA, 31 bp, Artificial Sequence
  Description of Artificial Sequence:  Enzymatic Nucleic Acid
gcccggggggctagctacaacgacctcctac

SEQ ID NO: 4015 - DNA, 31 bp, Artificial Sequence
  Description of Artificial Sequence:  Enzymatic Nucleic Acid
gcctgcggggctagctacaacgaccggggtc

SEQ ID NO: 4016 - DNA, 31 bp, Artificial Sequence
  Description of Artificial Sequence:  Enzymatic Nucleic Acid
ggggcctgggctagctacaacgaggcccggg

SEQ ID NO: 4017 - DNA, 31 bp, Artificial Sequence
  Description of Artificial Sequence:  Enzymatic Nucleic Acid
ctcaggggggctagctacaacgactgcggcc

SEQ ID NO: 4018 - DNA, 31 bp, Artificial Sequence
  Description of Artificial Sequence:  Enzymatic Nucleic Acid
cgtcatcgggctagctacaacgatcctcagg

SEQ ID NO: 4019 - DNA, 31 bp, Artificial Sequence
  Description of Artificial Sequence:  Enzymatic Nucleic Acid
ttccgtcaggctagctacaacgacgctcctc

SEQ ID NO: 4020 - DNA, 31 bp, Artificial Sequence
  Description of Artificial Sequence:  Enzymatic Nucleic Acid
atattccgggctagctacaacgacatcgctc

SEQ ID NO: 4021 - DNA, 31 bp, Artificial Sequence
  Description of Artificial Sequence:  Enzymatic Nucleic Acid
agcttataggctagctacaacgatccgtcat

SEQ ID NO: 4022 - DNA, 31 bp, Artificial Sequence
  Description of Artificial Sequence:  Enzymatic Nucleic Acid
ccagcttaggctagctacaacgaattccgtc

SEQ ID NO: 4023 - DNA, 31 bp, Artificial Sequence
  Description of Artificial Sequence:  Enzymatic Nucleic Acid
accaccagggctagctacaacgattatattc

SEQ ID NO: 4024 - DNA, 31 bp, Artificial Sequence
  Description of Artificial Sequence:  Enzymatic Nucleic Acid
caccaccaggctagctacaacgacagcttat

SEQ ID NO: 4025 - DNA, 31 bp, Artificial Sequence
  Description of Artificial Sequence:  Enzymatic Nucleic Acid
gcccaccaggctagctacaacgacaccagct

SEQ ID NO: 4026 - DNA, 31 bp, Artificial Sequence
  Description of Artificial Sequence:  Enzymatic Nucleic Acid
ggcgcccaggctagctacaacgacaccacca

SEQ ID NO: 4027 - DNA, 31 bp, Artificial Sequence
  Description of Artificial Sequence:  Enzymatic Nucleic Acid
cgccggcgggctagctacaacgaccaccacc

SEQ ID NO: 4028 - DNA, 31 bp, Artificial Sequence
  Description of Artificial Sequence:  Enzymatic Nucleic Acid
accgccggggctagctacaacgagcccacca

SEQ ID NO: 4029 - DNA, 31 bp, Artificial Sequence
  Description of Artificial Sequence:  Enzymatic Nucleic Acid
ccacaccgggctagctacaacgacggcgccc

SEQ ID NO: 4030 - DNA, 31 bp, Artificial Sequence
  Description of Artificial Sequence:  Enzymatic Nucleic Acid
tgcccacaggctagctacaacgacgccggcg

SEQ ID NO: 4031 - DNA, 31 bp, Artificial Sequence
  Description of Artificial Sequence:  Enzymatic Nucleic Acid
cttgcccaggctagctacaacgaaccgccgg

SEQ ID NO: 4032 - DNA, 31 bp, Artificial Sequence
  Description of Artificial Sequence:  Enzymatic Nucleic Acid
cactcttgggctagctacaacgaccacaccg

SEQ ID NO: 4033 - DNA, 31 bp, Artificial Sequence
  Description of Artificial Sequence:  Enzymatic Nucleic Acid
tcagcgcaggctagctacaacgatcttgccc

SEQ ID NO: 4034 - DNA, 31 bp, Artificial Sequence
  Description of Artificial Sequence:  Enzymatic Nucleic Acid
ggtcagcgggctagctacaacgaactcttgc

SEQ ID NO: 4035 - DNA, 31 bp, Artificial Sequence
  Description of Artificial Sequence:  Enzymatic Nucleic Acid
atggtcagggctagctacaacgagcactctt

SEQ ID NO: 4036 - DNA, 31 bp, Artificial Sequence
  Description of Artificial Sequence:  Enzymatic Nucleic Acid
ctggatggggctagctacaacgacagcgcac

SEQ ID NO: 4037 - DNA, 31 bp, Artificial Sequence
  Description of Artificial Sequence:  Enzymatic Nucleic Acid
cagctggaggctagctacaacgaggtcagcg

SEQ ID NO: 4038 - DNA, 31 bp, Artificial Sequence
  Description of Artificial Sequence:  Enzymatic Nucleic Acid
tggatcagggctagctacaacgatggatggt

SEQ ID NO: 4039 - DNA, 31 bp, Artificial Sequence
  Description of Artificial Sequence:  Enzymatic Nucleic Acid
gttctggaggctagctacaacgacagctgga

SEQ ID NO: 4040 - DNA, 31 bp, Artificial Sequence
  Description of Artificial Sequence:  Enzymatic Nucleic Acid
caaaatggggctagctacaacgatctggatc

SEQ ID NO: 4041 - DNA, 31 bp, Artificial Sequence
  Description of Artificial Sequence:  Enzymatic Nucleic Acid
ccacaaaaggctagctacaacgaggttctgg

SEQ ID NO: 4042 - DNA, 31 bp, Artificial Sequence
  Description of Artificial Sequence:  Enzymatic Nucleic Acid
ttcgtccaggctagctacaacgaaaaatggt

SEQ ID NO: 4043 - DNA, 31 bp, Artificial Sequence
  Description of Artificial Sequence:  Enzymatic Nucleic Acid
cgtattcgggctagctacaacgaccacaaaa

SEQ ID NO: 4044 - DNA, 31 bp, Artificial Sequence
  Description of Artificial Sequence:  Enzymatic Nucleic Acid
gggtcgtaggctagctacaacgatcgtccac

SEQ ID NO: 4045 - DNA, 31 bp, Artificial Sequence
  Description of Artificial Sequence:  Enzymatic Nucleic Acid
tggggtcgggctagctacaacgaattcgtcc

SEQ ID NO: 4046 - DNA, 31 bp, Artificial Sequence
  Description of Artificial Sequence:  Enzymatic Nucleic Acid
tagtggggggctagctacaacgacgtattcg

SEQ ID NO: 4047 - DNA, 31 bp, Artificial Sequence
  Description of Artificial Sequence:  Enzymatic Nucleic Acid
ctctatagggctagctacaacgaggggtcgt

SEQ ID NO: 4048 - DNA, 31 bp, Artificial Sequence
  Description of Artificial Sequence:  Enzymatic Nucleic Acid
atcctctaggctagctacaacgaagtggggt

SEQ ID NO: 4049 - DNA, 31 bp, Artificial Sequence
  Description of Artificial Sequence:  Enzymatic Nucleic Acid
ggtaggaaggctagctacaacgacctctata

SEQ ID NO: 4050 - DNA, 31 bp, Artificial Sequence
  Description of Artificial Sequence:  Enzymatic Nucleic Acid
gcttccggggctagctacaacgaaggaatcc

SEQ ID NO: 4051 - DNA, 31 bp, Artificial Sequence
  Description of Artificial Sequence:  Enzymatic Nucleic Acid
accacctgggctagctacaacgattccggta

SEQ ID NO: 4052 - DNA, 31 bp, Artificial Sequence
  Description of Artificial Sequence:  Enzymatic Nucleic Acid
aatgaccaggctagctacaacgactgcttcc

SEQ ID NO: 4053 - DNA, 31 bp, Artificial Sequence
  Description of Artificial Sequence:  Enzymatic Nucleic Acid
atcaatgaggctagctacaacgacacctgct

SEQ ID NO: 4054 - DNA, 31 bp, Artificial Sequence
  Description of Artificial Sequence:  Enzymatic Nucleic Acid
cccatcaaggctagctacaacgagaccacct

SEQ ID NO: 4055 - DNA, 31 bp, Artificial Sequence
  Description of Artificial Sequence:  Enzymatic Nucleic Acid
tctccccaggctagctacaacgacaatgacc

SEQ ID NO: 4056 - DNA, 31 bp, Artificial Sequence
  Description of Artificial Sequence:  Enzymatic Nucleic Acid
caggcacgggctagctacaacgactccccat

SEQ ID NO: 4057 - DNA, 31 bp, Artificial Sequence
  Description of Artificial Sequence:  Enzymatic Nucleic Acid
aacaggcaggctagctacaacgagtctcccc

SEQ ID NO: 4058 - DNA, 31 bp, Artificial Sequence
  Description of Artificial Sequence:  Enzymatic Nucleic Acid
ccaacaggggctagctacaacgaacgtctcc

SEQ ID NO: 4059 - DNA, 31 bp, Artificial Sequence
  Description of Artificial Sequence:  Enzymatic Nucleic Acid
atgtccaaggctagctacaacgaaggcacgt

SEQ ID NO: 4060 - DNA, 31 bp, Artificial Sequence
  Description of Artificial Sequence:  Enzymatic Nucleic Acid
ccaggatgggctagctacaacgaccaacagg

SEQ ID NO: 4061 - DNA, 31 bp, Artificial Sequence
  Description of Artificial Sequence:  Enzymatic Nucleic Acid
atccaggaggctagctacaacgagtccaaca

SEQ ID NO: 4062 - DNA, 31 bp, Artificial Sequence
  Description of Artificial Sequence:  Enzymatic Nucleic Acid
cggcggtaggctagctacaacgaccaggatg

SEQ ID NO: 4063 - DNA, 31 bp, Artificial Sequence
  Description of Artificial Sequence:  Enzymatic Nucleic Acid
gccggcggggctagctacaacgaatccagga

SEQ ID NO: 4064 - DNA, 31 bp, Artificial Sequence
  Description of Artificial Sequence:  Enzymatic Nucleic Acid
ctggccggggctagctacaacgaggtatcca

SEQ ID NO: 4065 - DNA, 31 bp, Artificial Sequence
  Description of Artificial Sequence:  Enzymatic Nucleic Acid
cctcctggggctagctacaacgacggcggta

SEQ ID NO: 4066 - DNA, 31 bp, Artificial Sequence
  Description of Artificial Sequence:  Enzymatic Nucleic Acid
gcgctgtaggctagctacaacgatcctcctg

SEQ ID NO: 4067 - DNA, 31 bp, Artificial Sequence
  Description of Artificial Sequence:  Enzymatic Nucleic Acid
tggcgctgggctagctacaacgaactcctcc

SEQ ID NO: 4068 - DNA, 31 bp, Artificial Sequence
  Description of Artificial Sequence:  Enzymatic Nucleic Acid
gcatggcgggctagctacaacgatgtactcc

SEQ ID NO: 4069 - DNA, 31 bp, Artificial Sequence
  Description of Artificial Sequence:  Enzymatic Nucleic Acid
ccgcatggggctagctacaacgagctgtact

SEQ ID NO: 4070 - DNA, 31 bp, Artificial Sequence
  Description of Artificial Sequence:  Enzymatic Nucleic Acid
gtcccgcaggctagctacaacgaggcgctgt

SEQ ID NO: 4071 - DNA, 31 bp, Artificial Sequence
  Description of Artificial Sequence:  Enzymatic Nucleic Acid
tggtcccgggctagctacaacgaatggcgct

SEQ ID NO: 4072 - DNA, 31 bp, Artificial Sequence
  Description of Artificial Sequence:  Enzymatic Nucleic Acid
tgtactggggctagctacaacgacccgcatg

SEQ ID NO: 4073 - DNA, 31 bp, Artificial Sequence
  Description of Artificial Sequence:  Enzymatic Nucleic Acid
cgcatgtaggctagctacaacgatggtcccg

SEQ ID NO: 4074 - DNA, 31 bp, Artificial Sequence
  Description of Artificial Sequence:  Enzymatic Nucleic Acid
tgcgcatgggctagctacaacgaactggtcc

SEQ ID NO: 4075 - DNA, 31 bp, Artificial Sequence
  Description of Artificial Sequence:  Enzymatic Nucleic Acid
ggtgcgcaggctagctacaacgagtactggt

SEQ ID NO: 4076 - DNA, 31 bp, Artificial Sequence
  Description of Artificial Sequence:  Enzymatic Nucleic Acid
ccggtgcgggctagctacaacgaatgtactg

SEQ ID NO: 4077 - DNA, 31 bp, Artificial Sequence
  Description of Artificial Sequence:  Enzymatic Nucleic Acid
ccccggtgggctagctacaacgagcatgtac

SEQ ID NO: 4078 - DNA, 31 bp, Artificial Sequence
  Description of Artificial Sequence:  Enzymatic Nucleic Acid
ctccccggggctagctacaacgagcgcatgt

SEQ ID NO: 4079 - DNA, 31 bp, Artificial Sequence
  Description of Artificial Sequence:  Enzymatic Nucleic Acid
acaggaagggctagctacaacgacctccccg

SEQ ID NO: 4080 - DNA, 31 bp, Artificial Sequence
  Description of Artificial Sequence:  Enzymatic Nucleic Acid
aacacacaggctagctacaacgaaggaagcc

SEQ ID NO: 4081 - DNA, 31 bp, Artificial Sequence
  Description of Artificial Sequence:  Enzymatic Nucleic Acid
caaacacaggctagctacaacgaacaggaag

SEQ ID NO: 4082 - DNA, 31 bp, Artificial Sequence
  Description of Artificial Sequence:  Enzymatic Nucleic Acid
ggcaaacaggctagctacaacgaacacagga

SEQ ID NO: 4083 - DNA, 31 bp, Artificial Sequence
  Description of Artificial Sequence:  Enzymatic Nucleic Acid
atggcaaaggctagctacaacgaacacacag

SEQ ID NO: 4084 - DNA, 31 bp, Artificial Sequence
  Description of Artificial Sequence:  Enzymatic Nucleic Acid
gttgatggggctagctacaacgaaaacacac

SEQ ID NO: 4085 - DNA, 31 bp, Artificial Sequence
  Description of Artificial Sequence:  Enzymatic Nucleic Acid
gttgttgaggctagctacaacgaggcaaaca

SEQ ID NO: 4086 - DNA, 31 bp, Artificial Sequence
  Description of Artificial Sequence:  Enzymatic Nucleic Acid
tggtgttgggctagctacaacgatgatggca

SEQ ID NO: 4087 - DNA, 31 bp, Artificial Sequence
  Description of Artificial Sequence:  Enzymatic Nucleic Acid
acttggtgggctagctacaacgatgttgatg

SEQ ID NO: 4088 - DNA, 31 bp, Artificial Sequence
  Description of Artificial Sequence:  Enzymatic Nucleic Acid
agacttggggctagctacaacgagttgttga

SEQ ID NO: 4089 - DNA, 31 bp, Artificial Sequence
  Description of Artificial Sequence:  Enzymatic Nucleic Acid
tcaaaagaggctagctacaacgattggtgtt

SEQ ID NO: 4090 - DNA, 31 bp, Artificial Sequence
  Description of Artificial Sequence:  Enzymatic Nucleic Acid
ggtggatgggctagctacaacgacctcaaaa

SEQ ID NO: 4091 - DNA, 31 bp, Artificial Sequence
  Description of Artificial Sequence:  Enzymatic Nucleic Acid
ctggtggaggctagctacaacgagtcctcaa

SEQ ID NO: 4092 - DNA, 31 bp, Artificial Sequence
  Description of Artificial Sequence:  Enzymatic Nucleic Acid
tgtactggggctagctacaacgaggatgtcc

SEQ ID NO: 4093 - DNA, 31 bp, Artificial Sequence
  Description of Artificial Sequence:  Enzymatic Nucleic Acid
tccctgtaggctagctacaacgatggtggat

SEQ ID NO: 4094 - DNA, 31 bp, Artificial Sequence
  Description of Artificial Sequence:  Enzymatic Nucleic Acid
gctccctgggctagctacaacgaactggtgg

SEQ ID NO: 4095 - DNA, 31 bp, Artificial Sequence
  Description of Artificial Sequence:  Enzymatic Nucleic Acid
ttgatctgggctagctacaacgatccctgta

SEQ ID NO: 4096 - DNA, 31 bp, Artificial Sequence
  Description of Artificial Sequence:  Enzymatic Nucleic Acid
ccgtttgaggctagctacaacgactgctccc

SEQ ID NO: 4097 - DNA, 31 bp, Artificial Sequence
  Description of Artificial Sequence:  Enzymatic Nucleic Acid
ttcacccgggctagctacaacgattgatctg

SEQ ID NO: 4098 - DNA, 31 bp, Artificial Sequence
  Description of Artificial Sequence:  Enzymatic Nucleic Acid
gtccttcaggctagctacaacgaccgtttga

SEQ ID NO: 4099 - DNA, 31 bp, Artificial Sequence
  Description of Artificial Sequence:  Enzymatic Nucleic Acid
catccgagggctagctacaacgaccttcacc

SEQ ID NO: 4100 - DNA, 31 bp, Artificial Sequence
  Description of Artificial Sequence:  Enzymatic Nucleic Acid
gcacgtcaggctagctacaacgaccgagtcc

SEQ ID NO: 4101 - DNA, 31 bp, Artificial Sequence
  Description of Artificial Sequence:  Enzymatic Nucleic Acid
tgggcacgggctagctacaacgacatccgag

SEQ ID NO: 4102 - DNA, 31 bp, Artificial Sequence
  Description of Artificial Sequence:  Enzymatic Nucleic Acid
catgggcaggctagctacaacgagtcatccg

SEQ ID NO: 4103 - DNA, 31 bp, Artificial Sequence
  Description of Artificial Sequence:  Enzymatic Nucleic Acid
accatgggggctagctacaacgaacgtcatc

SEQ ID NO: 4104 - DNA, 31 bp, Artificial Sequence
  Description of Artificial Sequence:  Enzymatic Nucleic Acid
cagcaccaggctagctacaacgagggcacgt

SEQ ID NO: 4105 - DNA, 31 bp, Artificial Sequence
  Description of Artificial Sequence:  Enzymatic Nucleic Acid
caccagcaggctagctacaacgacatgggca

SEQ ID NO: 4106 - DNA, 31 bp, Artificial Sequence
  Description of Artificial Sequence:  Enzymatic Nucleic Acid
cccaccagggctagctacaacgaaccatggg

SEQ ID NO: 4107 - DNA, 31 bp, Artificial Sequence
  Description of Artificial Sequence:  Enzymatic Nucleic Acid
gttccccaggctagctacaacgacagcacca

SEQ ID NO: 4108 - DNA, 31 bp, Artificial Sequence
  Description of Artificial Sequence:  Enzymatic Nucleic Acid
cacacttgggctagctacaacgatccccacc

SEQ ID NO: 4109 - DNA, 31 bp, Artificial Sequence
  Description of Artificial Sequence:  Enzymatic Nucleic Acid
aggtcacaggctagctacaacgattgttccc

SEQ ID NO: 4110 - DNA, 31 bp, Artificial Sequence
  Description of Artificial Sequence:  Enzymatic Nucleic Acid
ccaggtcaggctagctacaacgaacttgttc

SEQ ID NO: 4111 - DNA, 31 bp, Artificial Sequence
  Description of Artificial Sequence:  Enzymatic Nucleic Acid
cagccaggggctagctacaacgacacacttg

SEQ ID NO: 4112 - DNA, 31 bp, Artificial Sequence
  Description of Artificial Sequence:  Enzymatic Nucleic Acid
gcgtgcagggctagctacaacgacaggtcac

SEQ ID NO: 4113 - DNA, 31 bp, Artificial Sequence
  Description of Artificial Sequence:  Enzymatic Nucleic Acid
agtgcgtgggctagctacaacgaagccaggt

SEQ ID NO: 4114 - DNA, 31 bp, Artificial Sequence
  Description of Artificial Sequence:  Enzymatic Nucleic Acid
acagtgcgggctagctacaacgagcagccag

SEQ ID NO: 4115 - DNA, 31 bp, Artificial Sequence
  Description of Artificial Sequence:  Enzymatic Nucleic Acid
ccacagtgggctagctacaacgagtgcagcc

SEQ ID NO: 4116 - DNA, 31 bp, Artificial Sequence
  Description of Artificial Sequence:  Enzymatic Nucleic Acid
ttccacagggctagctacaacgagcgtgcag

SEQ ID NO: 4117 - DNA, 31 bp, Artificial Sequence
  Description of Artificial Sequence:  Enzymatic Nucleic Acid
agattccaggctagctacaacgaagtgcgtg

SEQ ID NO: 4118 - DNA, 31 bp, Artificial Sequence
  Description of Artificial Sequence:  Enzymatic Nucleic Acid
tgccgagaggctagctacaacgatccacagt

SEQ ID NO: 4119 - DNA, 31 bp, Artificial Sequence
  Description of Artificial Sequence:  Enzymatic Nucleic Acid
tgagcctgggctagctacaacgacgagattc

SEQ ID NO: 4120 - DNA, 31 bp, Artificial Sequence
  Description of Artificial Sequence:  Enzymatic Nucleic Acid
gtcctgagggctagctacaacgactgccgag

SEQ ID NO: 4121 - DNA, 31 bp, Artificial Sequence
  Description of Artificial Sequence:  Enzymatic Nucleic Acid
gggcgaggggctagctacaacgacctgagcc

SEQ ID NO: 4122 - DNA, 31 bp, Artificial Sequence
  Description of Artificial Sequence:  Enzymatic Nucleic Acid
gcttcgggggctagctacaacgagaggtcct

SEQ ID NO: 4123 - DNA, 31 bp, Artificial Sequence
  Description of Artificial Sequence:  Enzymatic Nucleic Acid
tgccgtagggctagctacaacgattcgggcg

SEQ ID NO: 4124 - DNA, 31 bp, Artificial Sequence
  Description of Artificial Sequence:  Enzymatic Nucleic Acid
ggatgccgggctagctacaacgaagcttcgg

SEQ ID NO: 4125 - DNA, 31 bp, Artificial Sequence
  Description of Artificial Sequence:  Enzymatic Nucleic Acid
aggggatgggctagctacaacgacgtagctt

SEQ ID NO: 4126 - DNA, 31 bp, Artificial Sequence
  Description of Artificial Sequence:  Enzymatic Nucleic Acid
gtaggggaggctagctacaacgagccgtagc

SEQ ID NO: 4127 - DNA, 31 bp, Artificial Sequence
  Description of Artificial Sequence:  Enzymatic Nucleic Acid
tctcgatgggctagctacaacgaaggggatg

SEQ ID NO: 4128 - DNA, 31 bp, Artificial Sequence
  Description of Artificial Sequence:  Enzymatic Nucleic Acid
ggtctcgaggctagctacaacgagtagggga

SEQ ID NO: 4129 - DNA, 31 bp, Artificial Sequence
  Description of Artificial Sequence:  Enzymatic Nucleic Acid
ggccgaggggctagctacaacgactcgatgt

SEQ ID NO: 4130 - DNA, 31 bp, Artificial Sequence
  Description of Artificial Sequence:  Enzymatic Nucleic Acid
ggtcttggggctagctacaacgacgaggtct

SEQ ID NO: 4131 - DNA, 31 bp, Artificial Sequence
  Description of Artificial Sequence:  Enzymatic Nucleic Acid
ctgccgggggctagctacaacgacttggccg

SEQ ID NO: 4132 - DNA, 31 bp, Artificial Sequence
  Description of Artificial Sequence:  Enzymatic Nucleic Acid
actccctgggctagctacaacgacgggtctt

SEQ ID NO: 4133 - DNA, 31 bp, Artificial Sequence
  Description of Artificial Sequence:  Enzymatic Nucleic Acid
atcctccaggctagctacaacgatccctgcc

SEQ ID NO: 4134 - DNA, 31 bp, Artificial Sequence
  Description of Artificial Sequence:  Enzymatic Nucleic Acid
agaaggcaggctagctacaacgacctccact

SEQ ID NO: 4135 - DNA, 31 bp, Artificial Sequence
  Description of Artificial Sequence:  Enzymatic Nucleic Acid
gtagaaggggctagctacaacgaatcctcca

SEQ ID NO: 4136 - DNA, 31 bp, Artificial Sequence
  Description of Artificial Sequence:  Enzymatic Nucleic Acid
ccaacgtgggctagctacaacgaagaaggca

SEQ ID NO: 4137 - DNA, 31 bp, Artificial Sequence
  Description of Artificial Sequence:  Enzymatic Nucleic Acid
caccaacgggctagctacaacgagtagaagg

SEQ ID NO: 4138 - DNA, 31 bp, Artificial Sequence
  Description of Artificial Sequence:  Enzymatic Nucleic Acid
cgcaccaaggctagctacaacgagtgtagaa

SEQ ID NO: 4139 - DNA, 31 bp, Artificial Sequence
  Description of Artificial Sequence:  Enzymatic Nucleic Acid
ctcacgcaggctagctacaacgacaacgtgt

SEQ ID NO: 4140 - DNA, 31 bp, Artificial Sequence
  Description of Artificial Sequence:  Enzymatic Nucleic Acid
atctcacgggctagctacaacgaaccaacgt

SEQ ID NO: 4141 - DNA, 31 bp, Artificial Sequence
  Description of Artificial Sequence:  Enzymatic Nucleic Acid
ggatctcaggctagctacaacgagcaccaac

SEQ ID NO: 4142 - DNA, 31 bp, Artificial Sequence
  Description of Artificial Sequence:  Enzymatic Nucleic Acid
ctgccggaggctagctacaacgactcacgca

SEQ ID NO: 4143 - DNA, 31 bp, Artificial Sequence
  Description of Artificial Sequence:  Enzymatic Nucleic Acid
ttgtgctgggctagctacaacgacggatctc

SEQ ID NO: 4144 - DNA, 31 bp, Artificial Sequence
  Description of Artificial Sequence:  Enzymatic Nucleic Acid
agcttgtgggctagctacaacgatgccggat

SEQ ID NO: 4145 - DNA, 31 bp, Artificial Sequence
  Description of Artificial Sequence:  Enzymatic Nucleic Acid
gcagcttgggctagctacaacgagctgccgg

SEQ ID NO: 4146 - DNA, 31 bp, Artificial Sequence
  Description of Artificial Sequence:  Enzymatic Nucleic Acid
ttccgcagggctagctacaacgattgtgctg

SEQ ID NO: 4147 - DNA, 31 bp, Artificial Sequence
  Description of Artificial Sequence:  Enzymatic Nucleic Acid
agcttccgggctagctacaacgaagcttgtg

SEQ ID NO: 4148 - DNA, 31 bp, Artificial Sequence
  Description of Artificial Sequence:  Enzymatic Nucleic Acid
gggttcagggctagctacaacgattccgcag

SEQ ID NO: 4149 - DNA, 31 bp, Artificial Sequence
  Description of Artificial Sequence:  Enzymatic Nucleic Acid
caggagggggctagctacaacgatcagcttc

SEQ ID NO: 4150 - DNA, 31 bp, Artificial Sequence
  Description of Artificial Sequence:  Enzymatic Nucleic Acid
cactctcaggctagctacaacgacaggaggg

SEQ ID NO: 4151 - DNA, 31 bp, Artificial Sequence
  Description of Artificial Sequence:  Enzymatic Nucleic Acid
cggggccaggctagctacaacgatctcatca

SEQ ID NO: 4152 - DNA, 31 bp, Artificial Sequence
  Description of Artificial Sequence:  Enzymatic Nucleic Acid
agccggggggctagctacaacgacactctca

SEQ ID NO: 4153 - DNA, 31 bp, Artificial Sequence
  Description of Artificial Sequence:  Enzymatic Nucleic Acid
tcatgcagggctagctacaacgacggggcca

SEQ ID NO: 4154 - DNA, 31 bp, Artificial Sequence
  Description of Artificial Sequence:  Enzymatic Nucleic Acid
agctcatgggctagctacaacgaagccgggg

SEQ ID NO: 4155 - DNA, 31 bp, Artificial Sequence
  Description of Artificial Sequence:  Enzymatic Nucleic Acid
gcagctcaggctagctacaacgagcagccgg

SEQ ID NO: 4156 - DNA, 31 bp, Artificial Sequence
  Description of Artificial Sequence:  Enzymatic Nucleic Acid
acttgcagggctagctacaacgatcatgcag

SEQ ID NO: 4157 - DNA, 31 bp, Artificial Sequence
  Description of Artificial Sequence:  Enzymatic Nucleic Acid
cacacttgggctagctacaacgaagctcatg

SEQ ID NO: 4158 - DNA, 31 bp, Artificial Sequence
  Description of Artificial Sequence:  Enzymatic Nucleic Acid
agcacacaggctagctacaacgattgcagct

SEQ ID NO: 4159 - DNA, 31 bp, Artificial Sequence
  Description of Artificial Sequence:  Enzymatic Nucleic Acid
agagcacaggctagctacaacgaacttgcag

SEQ ID NO: 4160 - DNA, 31 bp, Artificial Sequence
  Description of Artificial Sequence:  Enzymatic Nucleic Acid
ggagagcaggctagctacaacgaacacttgc

SEQ ID NO: 4161 - DNA, 31 bp, Artificial Sequence
  Description of Artificial Sequence:  Enzymatic Nucleic Acid
caggagagggctagctacaacgaacacactt

SEQ ID NO: 4162 - DNA, 31 bp, Artificial Sequence
  Description of Artificial Sequence:  Enzymatic Nucleic Acid
cacctgcgggctagctacaacgacaggagag

SEQ ID NO: 4163 - DNA, 31 bp, Artificial Sequence
  Description of Artificial Sequence:  Enzymatic Nucleic Acid
ctcacctgggctagctacaacgagtcaggag

SEQ ID NO: 4164 - DNA, 31 bp, Artificial Sequence
  Description of Artificial Sequence:  Enzymatic Nucleic Acid
ccccctcaggctagctacaacgactgcgtca

SEQ ID NO: 4165 - DNA, 31 bp, Artificial Sequence
  Description of Artificial Sequence:  Enzymatic Nucleic Acid
cctgggagggctagctacaacgaccccctca

SEQ ID NO: 4166 - DNA, 31 bp, Artificial Sequence
  Description of Artificial Sequence:  Enzymatic Nucleic Acid
ggcggccgggctagctacaacgacctgggag

SEQ ID NO: 4167 - DNA, 31 bp, Artificial Sequence
  Description of Artificial Sequence:  Enzymatic Nucleic Acid
cgtggcggggctagctacaacgacgccctgg

SEQ ID NO: 4168 - DNA, 31 bp, Artificial Sequence
  Description of Artificial Sequence:  Enzymatic Nucleic Acid
gggcgtggggctagctacaacgaggccgccc

SEQ ID NO: 4169 - DNA, 31 bp, Artificial Sequence
  Description of Artificial Sequence:  Enzymatic Nucleic Acid
ggtgggcgggctagctacaacgaggcggccg

SEQ ID NO: 4170 - DNA, 31 bp, Artificial Sequence
  Description of Artificial Sequence:  Enzymatic Nucleic Acid
ccggtgggggctagctacaacgagtggcggc

SEQ ID NO: 4171 - DNA, 31 bp, Artificial Sequence
  Description of Artificial Sequence:  Enzymatic Nucleic Acid
tcatccggggctagctacaacgagggcgtgg

SEQ ID NO: 4172 - DNA, 31 bp, Artificial Sequence
  Description of Artificial Sequence:  Enzymatic Nucleic Acid
cggggtcaggctagctacaacgaccggtggg

SEQ ID NO: 4173 - DNA, 31 bp, Artificial Sequence
  Description of Artificial Sequence:  Enzymatic Nucleic Acid
agccggggggctagctacaacgacatccggt

SEQ ID NO: 4174 - DNA, 31 bp, Artificial Sequence
  Description of Artificial Sequence:  Enzymatic Nucleic Acid
gcggggagggctagctacaacgacggggtca

SEQ ID NO: 4175 - DNA, 31 bp, Artificial Sequence
  Description of Artificial Sequence:  Enzymatic Nucleic Acid
ggcaggggggctagctacaacgaggggagcc

SEQ ID NO: 4176 - DNA, 31 bp, Artificial Sequence
  Description of Artificial Sequence:  Enzymatic Nucleic Acid
gagaccggggctagctacaacgaaggggcgg

SEQ ID NO: 4177 - DNA, 31 bp, Artificial Sequence
  Description of Artificial Sequence:  Enzymatic Nucleic Acid
ccaggagaggctagctacaacgacggcaggg

SEQ ID NO: 4178 - DNA, 31 bp, Artificial Sequence
  Description of Artificial Sequence:  Enzymatic Nucleic Acid
accgcaggggctagctacaacgacaggagac

SEQ ID NO: 4179 - DNA, 31 bp, Artificial Sequence
  Description of Artificial Sequence:  Enzymatic Nucleic Acid
gctgaccgggctagctacaacgaaggccagg

SEQ ID NO: 4180 - DNA, 31 bp, Artificial Sequence
  Description of Artificial Sequence:  Enzymatic Nucleic Acid
gctgctgaggctagctacaacgacgcaggcc

SEQ ID NO: 4181 - DNA, 31 bp, Artificial Sequence
  Description of Artificial Sequence:  Enzymatic Nucleic Acid
ggaggctgggctagctacaacgatgaccgca

SEQ ID NO: 4182 - DNA, 31 bp, Artificial Sequence
  Description of Artificial Sequence:  Enzymatic Nucleic Acid
aagggaggggctagctacaacgatgctgacc

SEQ ID NO: 4183 - DNA, 31 bp, Artificial Sequence
  Description of Artificial Sequence:  Enzymatic Nucleic Acid
gcggggcaggctagctacaacgaaagggagg

SEQ ID NO: 4184 - DNA, 31 bp, Artificial Sequence
  Description of Artificial Sequence:  Enzymatic Nucleic Acid
gggcggggggctagctacaacgaacaaggga

SEQ ID NO: 4185 - DNA, 31 bp, Artificial Sequence
  Description of Artificial Sequence:  Enzymatic Nucleic Acid
gtgctgggggctagctacaacgaggggcaca

SEQ ID NO: 4186 - DNA, 31 bp, Artificial Sequence
  Description of Artificial Sequence:  Enzymatic Nucleic Acid
agcttgtgggctagctacaacgatgggcggg

SEQ ID NO: 4187 - DNA, 31 bp, Artificial Sequence
  Description of Artificial Sequence:  Enzymatic Nucleic Acid
tgagcttgggctagctacaacgagctgggcg

SEQ ID NO: 4188 - DNA, 31 bp, Artificial Sequence
  Description of Artificial Sequence:  Enzymatic Nucleic Acid
gtcctgagggctagctacaacgattgtgctg

SEQ ID NO: 4189 - DNA, 31 bp, Artificial Sequence
  Description of Artificial Sequence:  Enzymatic Nucleic Acid
cctccatgggctagctacaacgacctgagct

SEQ ID NO: 4190 - DNA, 31 bp, Artificial Sequence
  Description of Artificial Sequence:  Enzymatic Nucleic Acid
cacctccaggctagctacaacgagtcctgag

SEQ ID NO: 4191 - DNA, 31 bp, Artificial Sequence
  Description of Artificial Sequence:  Enzymatic Nucleic Acid
atccggcaggctagctacaacgactccatgt

SEQ ID NO: 4192 - DNA, 31 bp, Artificial Sequence
  Description of Artificial Sequence:  Enzymatic Nucleic Acid
gcatccggggctagctacaacgaacctccat

SEQ ID NO: 4193 - DNA, 31 bp, Artificial Sequence
  Description of Artificial Sequence:  Enzymatic Nucleic Acid
ttcctgcaggctagctacaacgaccggcacc

SEQ ID NO: 4194 - DNA, 31 bp, Artificial Sequence
  Description of Artificial Sequence:  Enzymatic Nucleic Acid
ccttcctgggctagctacaacgaatccggca

SEQ ID NO: 4195 - DNA, 31 bp, Artificial Sequence
  Description of Artificial Sequence:  Enzymatic Nucleic Acid
cgtctgcaggctagctacaacgactccttcc

SEQ ID NO: 4196 - DNA, 31 bp, Artificial Sequence
  Description of Artificial Sequence:  Enzymatic Nucleic Acid
tccgtctgggctagctacaacgaacctcctt

SEQ ID NO: 4197 - DNA, 31 bp, Artificial Sequence
  Description of Artificial Sequence:  Enzymatic Nucleic Acid
tccttccgggctagctacaacgactgcacct

SEQ ID NO: 4198 - DNA, 31 bp, Artificial Sequence
  Description of Artificial Sequence:  Enzymatic Nucleic Acid
tgcttccgggctagctacaacgaccttcctt

SEQ ID NO: 4199 - DNA, 31 bp, Artificial Sequence
  Description of Artificial Sequence:  Enzymatic Nucleic Acid
cttccttgggctagctacaacgattccgtcc

SEQ ID NO: 4200 - DNA, 31 bp, Artificial Sequence
  Description of Artificial Sequence:  Enzymatic Nucleic Acid
tccagcagggctagctacaacgaccttcctt

SEQ ID NO: 4201 - DNA, 31 bp, Artificial Sequence
  Description of Artificial Sequence:  Enzymatic Nucleic Acid
ggctccagggctagctacaacgaagcccttc

SEQ ID NO: 4202 - DNA, 31 bp, Artificial Sequence
  Description of Artificial Sequence:  Enzymatic Nucleic Acid
tgactgggggctagctacaacgatccagcag

SEQ ID NO: 4203 - DNA, 31 bp, Artificial Sequence
  Description of Artificial Sequence:  Enzymatic Nucleic Acid
cggggtgaggctagctacaacgatgggctcc

SEQ ID NO: 4204 - DNA, 31 bp, Artificial Sequence
  Description of Artificial Sequence:  Enzymatic Nucleic Acid
tcccggggggctagctacaacgagactgggc

SEQ ID NO: 4205 - DNA, 31 bp, Artificial Sequence
  Description of Artificial Sequence:  Enzymatic Nucleic Acid
gcccacggggctagctacaacgacccggggt

SEQ ID NO: 4206 - DNA, 31 bp, Artificial Sequence
  Description of Artificial Sequence:  Enzymatic Nucleic Acid
tcggcccaggctagctacaacgaggtcccgg

SEQ ID NO: 4207 - DNA, 31 bp, Artificial Sequence
  Description of Artificial Sequence:  Enzymatic Nucleic Acid
cacctcggggctagctacaacgaccacggtc

SEQ ID NO: 4208 - DNA, 31 bp, Artificial Sequence
  Description of Artificial Sequence:  Enzymatic Nucleic Acid
tgcagtcaggctagctacaacgactcggccc

SEQ ID NO: 4209 - DNA, 31 bp, Artificial Sequence
  Description of Artificial Sequence:  Enzymatic Nucleic Acid
gtctgcagggctagctacaacgacacctcgg

SEQ ID NO: 4210 - DNA, 31 bp, Artificial Sequence
  Description of Artificial Sequence:  Enzymatic Nucleic Acid
agggtctgggctagctacaacgaagtcacct

SEQ ID NO: 4211 - DNA, 31 bp, Artificial Sequence
  Description of Artificial Sequence:  Enzymatic Nucleic Acid
tgggagggggctagctacaacgactgcagtc

SEQ ID NO: 4212 - DNA, 31 bp, Artificial Sequence
  Description of Artificial Sequence:  Enzymatic Nucleic Acid
gtgcacagggctagctacaacgactccctgg

SEQ ID NO: 4213 - DNA, 31 bp, Artificial Sequence
  Description of Artificial Sequence:  Enzymatic Nucleic Acid
tctgtgcaggctagctacaacgaagcctccc

SEQ ID NO: 4214 - DNA, 31 bp, Artificial Sequence
  Description of Artificial Sequence:  Enzymatic Nucleic Acid
agtctgtgggctagctacaacgaacagcctc

SEQ ID NO: 4215 - DNA, 31 bp, Artificial Sequence
  Description of Artificial Sequence:  Enzymatic Nucleic Acid
acagtctgggctagctacaacgagcacagcc

SEQ ID NO: 4216 - DNA, 31 bp, Artificial Sequence
  Description of Artificial Sequence:  Enzymatic Nucleic Acid
caagacagggctagctacaacgactgtgcac

SEQ ID NO: 4217 - DNA, 31 bp, Artificial Sequence
  Description of Artificial Sequence:  Enzymatic Nucleic Acid
gttcaagaggctagctacaacgaagtctgtg

SEQ ID NO: 4218 - DNA, 31 bp, Artificial Sequence
  Description of Artificial Sequence:  Enzymatic Nucleic Acid
ttgggatgggctagctacaacgatcaagaca

SEQ ID NO: 4219 - DNA, 31 bp, Artificial Sequence
  Description of Artificial Sequence:  Enzymatic Nucleic Acid
atttgggaggctagctacaacgagttcaaga

SEQ ID NO: 4220 - DNA, 31 bp, Artificial Sequence
  Description of Artificial Sequence:  Enzymatic Nucleic Acid
cggtggcaggctagctacaacgattgggatg

SEQ ID NO: 4221 - DNA, 31 bp, Artificial Sequence
  Description of Artificial Sequence:  Enzymatic Nucleic Acid
tccggtggggctagctacaacgaatttggga

SEQ ID NO: 4222 - DNA, 31 bp, Artificial Sequence
  Description of Artificial Sequence:  Enzymatic Nucleic Acid
ggttccggggctagctacaacgaggcatttg

SEQ ID NO: 4223 - DNA, 31 bp, Artificial Sequence
  Description of Artificial Sequence:  Enzymatic Nucleic Acid
ggctggggggctagctacaacgatccggtgg

SEQ ID NO: 4224 - DNA, 31 bp, Artificial Sequence
  Description of Artificial Sequence:  Enzymatic Nucleic Acid
gctaagggggctagctacaacgatggggttc

SEQ ID NO: 4225 - DNA, 31 bp, Artificial Sequence
  Description of Artificial Sequence:  Enzymatic Nucleic Acid
gaggggagggctagctacaacgataagggct

SEQ ID NO: 4226 - DNA, 31 bp, Artificial Sequence
  Description of Artificial Sequence:  Enzymatic Nucleic Acid
cacagaggggctagctacaacgactgggagg

SEQ ID NO: 4227 - DNA, 31 bp, Artificial Sequence
  Description of Artificial Sequence:  Enzymatic Nucleic Acid
agggcccaggctagctacaacgaagaggcct

SEQ ID NO: 4228 - DNA, 31 bp, Artificial Sequence
  Description of Artificial Sequence:  Enzymatic Nucleic Acid
gacaagggggctagctacaacgaccacagag

SEQ ID NO: 4229 - DNA, 31 bp, Artificial Sequence
  Description of Artificial Sequence:  Enzymatic Nucleic Acid
gtgcccgaggctagctacaacgaaagggccc

SEQ ID NO: 4230 - DNA, 31 bp, Artificial Sequence
  Description of Artificial Sequence:  Enzymatic Nucleic Acid
catctgtgggctagctacaacgaccgacaag

SEQ ID NO: 4231 - DNA, 31 bp, Artificial Sequence
  Description of Artificial Sequence:  Enzymatic Nucleic Acid
cccatctgggctagctacaacgagcccgaca

SEQ ID NO: 4232 - DNA, 31 bp, Artificial Sequence
  Description of Artificial Sequence:  Enzymatic Nucleic Acid
tgatcccaggctagctacaacgactgtgccc

SEQ ID NO: 4233 - DNA, 31 bp, Artificial Sequence
  Description of Artificial Sequence:  Enzymatic Nucleic Acid
tactgtgaggctagctacaacgacccatctg

SEQ ID NO: 4234 - DNA, 31 bp, Artificial Sequence
  Description of Artificial Sequence:  Enzymatic Nucleic Acid
atttactgggctagctacaacgagatcccat

SEQ ID NO: 4235 - DNA, 31 bp, Artificial Sequence
  Description of Artificial Sequence:  Enzymatic Nucleic Acid
ataatttaggctagctacaacgatgtgatcc

SEQ ID NO: 4236 - DNA, 31 bp, Artificial Sequence
  Description of Artificial Sequence:  Enzymatic Nucleic Acid
tccaataaggctagctacaacgattactgtg

SEQ ID NO: 4237 - DNA, 31 bp, Artificial Sequence
  Description of Artificial Sequence:  Enzymatic Nucleic Acid
ccatccaaggctagctacaacgaaatttact

SEQ ID NO: 4238 - DNA, 31 bp, Artificial Sequence
  Description of Artificial Sequence:  Enzymatic Nucleic Acid
caagaccaggctagctacaacgaccaataat

SEQ ID NO: 4239 - DNA, 31 bp, Artificial Sequence
  Description of Artificial Sequence:  Enzymatic Nucleic Acid
gatcaagaggctagctacaacgacatccaat

SEQ ID NO: 4240 - DNA, 31 bp, Artificial Sequence
  Description of Artificial Sequence:  Enzymatic Nucleic Acid
aaccaagaggctagctacaacgacaagacca

SEQ ID NO: 4241 - DNA, 31 bp, Artificial Sequence
  Description of Artificial Sequence:  Enzymatic Nucleic Acid
gccgaaaaggctagctacaacgacaagatca

SEQ ID NO: 4242 - DNA, 31 bp, Artificial Sequence
  Description of Artificial Sequence:  Enzymatic Nucleic Acid
accctcagggctagctacaacgacgaaaacc

SEQ ID NO: 4243 - DNA, 31 bp, Artificial Sequence
  Description of Artificial Sequence:  Enzymatic Nucleic Acid
gtgtcccaggctagctacaacgacctcagcc

SEQ ID NO: 4244 - DNA, 31 bp, Artificial Sequence
  Description of Artificial Sequence:  Enzymatic Nucleic Acid
gcaccgtgggctagctacaacgacccaccct

SEQ ID NO: 4245 - DNA, 31 bp, Artificial Sequence
  Description of Artificial Sequence:  Enzymatic Nucleic Acid
gcgcaccgggctagctacaacgagtcccacc

SEQ ID NO: 4246 - DNA, 31 bp, Artificial Sequence
  Description of Artificial Sequence:  Enzymatic Nucleic Acid
cacgcgcaggctagctacaacgacgtgtccc

SEQ ID NO: 4247 - DNA, 31 bp, Artificial Sequence
  Description of Artificial Sequence:  Enzymatic Nucleic Acid
cacacgcgggctagctacaacgaaccgtgtc

SEQ ID NO: 4248 - DNA, 31 bp, Artificial Sequence
  Description of Artificial Sequence:  Enzymatic Nucleic Acid
gccacacgggctagctacaacgagcaccgtg

SEQ ID NO: 4249 - DNA, 31 bp, Artificial Sequence
  Description of Artificial Sequence:  Enzymatic Nucleic Acid
aggccacaggctagctacaacgagcgcaccg

SEQ ID NO: 4250 - DNA, 31 bp, Artificial Sequence
  Description of Artificial Sequence:  Enzymatic Nucleic Acid
ccaggccaggctagctacaacgaacgcgcac

SEQ ID NO: 4251 - DNA, 31 bp, Artificial Sequence
  Description of Artificial Sequence:  Enzymatic Nucleic Acid
atgccaggggctagctacaacgacacacgcg

SEQ ID NO: 4252 - DNA, 31 bp, Artificial Sequence
  Description of Artificial Sequence:  Enzymatic Nucleic Acid
acctcatgggctagctacaacgacaggccac

SEQ ID NO: 4253 - DNA, 31 bp, Artificial Sequence
  Description of Artificial Sequence:  Enzymatic Nucleic Acid
atacctcaggctagctacaacgagccaggcc

SEQ ID NO: 4254 - DNA, 31 bp, Artificial Sequence
  Description of Artificial Sequence:  Enzymatic Nucleic Acid
ccgacataggctagctacaacgactcatgcc

SEQ ID NO: 4255 - DNA, 31 bp, Artificial Sequence
  Description of Artificial Sequence:  Enzymatic Nucleic Acid
ttccgacaggctagctacaacgaacctcatg

SEQ ID NO: 4256 - DNA, 31 bp, Artificial Sequence
  Description of Artificial Sequence:  Enzymatic Nucleic Acid
ggttccgaggctagctacaacgaatacctca

SEQ ID NO: 4257 - DNA, 31 bp, Artificial Sequence
  Description of Artificial Sequence:  Enzymatic Nucleic Acid
gcctgaggggctagctacaacgatccgacat

SEQ ID NO: 4258 - DNA, 31 bp, Artificial Sequence
  Description of Artificial Sequence:  Enzymatic Nucleic Acid
tggacaggggctagctacaacgactgaggtt

SEQ ID NO: 4259 - DNA, 31 bp, Artificial Sequence
  Description of Artificial Sequence:  Enzymatic Nucleic Acid
gggctggaggctagctacaacgaaggcctga

SEQ ID NO: 4260 - DNA, 31 bp, Artificial Sequence
  Description of Artificial Sequence:  Enzymatic Nucleic Acid
gcccagggggctagctacaacgatggacagg

SEQ ID NO: 4261 - DNA, 31 bp, Artificial Sequence
  Description of Artificial Sequence:  Enzymatic Nucleic Acid
atggagagggctagctacaacgaccagggct

SEQ ID NO: 4262 - DNA, 31 bp, Artificial Sequence
  Description of Artificial Sequence:  Enzymatic Nucleic Acid
aaaggctaggctagctacaacgaggagagcc

SEQ ID NO: 4263 - DNA, 31 bp, Artificial Sequence
  Description of Artificial Sequence:  Enzymatic Nucleic Acid
cccaaaggggctagctacaacgatatggaga

SEQ ID NO: 4264 - DNA, 31 bp, Artificial Sequence
  Description of Artificial Sequence:  Enzymatic Nucleic Acid
tctcccaaggctagctacaacgactccccct

SEQ ID NO: 4265 - DNA, 31 bp, Artificial Sequence
  Description of Artificial Sequence:  Enzymatic Nucleic Acid
ctgaccggggctagctacaacgactctccca

SEQ ID NO: 4266 - DNA, 31 bp, Artificial Sequence
  Description of Artificial Sequence:  Enzymatic Nucleic Acid
acccctgaggctagctacaacgacggcctct

SEQ ID NO: 4267 - DNA, 31 bp, Artificial Sequence
  Description of Artificial Sequence:  Enzymatic Nucleic Acid
agcccagaggctagctacaacgaccctgacc

SEQ ID NO: 4268 - DNA, 31 bp, Artificial Sequence
  Description of Artificial Sequence:  Enzymatic Nucleic Acid
caccacagggctagctacaacgaccagaccc

SEQ ID NO: 4269 - DNA, 31 bp, Artificial Sequence
  Description of Artificial Sequence:  Enzymatic Nucleic Acid
gagcaccaggctagctacaacgaagcccaga

SEQ ID NO: 4270 - DNA, 31 bp, Artificial Sequence
  Description of Artificial Sequence:  Enzymatic Nucleic Acid
agagagcaggctagctacaacgacacagccc

SEQ ID NO: 4271 - DNA, 31 bp, Artificial Sequence
  Description of Artificial Sequence:  Enzymatic Nucleic Acid
ggagagagggctagctacaacgaaccacagc

SEQ ID NO: 4272 - DNA, 31 bp, Artificial Sequence
  Description of Artificial Sequence:  Enzymatic Nucleic Acid
ggggcaggggctagctacaacgagggaggag

SEQ ID NO: 4273 - DNA, 31 bp, Artificial Sequence
  Description of Artificial Sequence:  Enzymatic Nucleic Acid
cactggggggctagctacaacgaaggcggga

SEQ ID NO: 4274 - DNA, 31 bp, Artificial Sequence
  Description of Artificial Sequence:  Enzymatic Nucleic Acid
cgtggacaggctagctacaacgatggggcag

SEQ ID NO: 4275 - DNA, 31 bp, Artificial Sequence
  Description of Artificial Sequence:  Enzymatic Nucleic Acid
gccgtggaggctagctacaacgaactggggc

SEQ ID NO: 4276 - DNA, 31 bp, Artificial Sequence
  Description of Artificial Sequence:  Enzymatic Nucleic Acid
agaagccgggctagctacaacgaggacactg

SEQ ID NO: 4277 - DNA, 31 bp, Artificial Sequence
  Description of Artificial Sequence:  Enzymatic Nucleic Acid
gccagaagggctagctacaacgacgtggaca

SEQ ID NO: 4278 - DNA, 31 bp, Artificial Sequence
  Description of Artificial Sequence:  Enzymatic Nucleic Acid
gctctctgggctagctacaacgacagaagcc

SEQ ID NO: 4279 - DNA, 31 bp, Artificial Sequence
  Description of Artificial Sequence:  Enzymatic Nucleic Acid
gtccagagggctagctacaacgatctctgcc

SEQ ID NO: 4280 - DNA, 31 bp, Artificial Sequence
  Description of Artificial Sequence:  Enzymatic Nucleic Acid
cctgcttgggctagctacaacgaccagagct

SEQ ID NO: 4281 - DNA, 31 bp, Artificial Sequence
  Description of Artificial Sequence:  Enzymatic Nucleic Acid
tctgcctgggctagctacaacgattgtccag

SEQ ID NO: 4282 - DNA, 31 bp, Artificial Sequence
  Description of Artificial Sequence:  Enzymatic Nucleic Acid
atgatctgggctagctacaacgactgcttgt

SEQ ID NO: 4283 - DNA, 31 bp, Artificial Sequence
  Description of Artificial Sequence:  Enzymatic Nucleic Acid
ccttatgaggctagctacaacgactgcctgc

SEQ ID NO: 4284 - DNA, 31 bp, Artificial Sequence
  Description of Artificial Sequence:  Enzymatic Nucleic Acid
tgtccttaggctagctacaacgagatctgcc

SEQ ID NO: 4285 - DNA, 31 bp, Artificial Sequence
  Description of Artificial Sequence:  Enzymatic Nucleic Acid
gctctctgggctagctacaacgaccttatga

SEQ ID NO: 4286 - DNA, 31 bp, Artificial Sequence
  Description of Artificial Sequence:  Enzymatic Nucleic Acid
acagtaagggctagctacaacgatctctgtc

SEQ ID NO: 4287 - DNA, 31 bp, Artificial Sequence
  Description of Artificial Sequence:  Enzymatic Nucleic Acid
aagcacagggctagctacaacgaaagctctc

SEQ ID NO: 4288 - DNA, 31 bp, Artificial Sequence
  Description of Artificial Sequence:  Enzymatic Nucleic Acid
tagaagcaggctagctacaacgaagtaagct

SEQ ID NO: 4289 - DNA, 31 bp, Artificial Sequence
  Description of Artificial Sequence:  Enzymatic Nucleic Acid
ggtagaagggctagctacaacgaacagtaag

SEQ ID NO: 4290 - DNA, 31 bp, Artificial Sequence
  Description of Artificial Sequence:  Enzymatic Nucleic Acid
ctagttggggctagctacaacgaagaagcac

SEQ ID NO: 4291 - DNA, 31 bp, Artificial Sequence
  Description of Artificial Sequence:  Enzymatic Nucleic Acid
cctcctagggctagctacaacgatggtagaa

SEQ ID NO: 4292 - DNA, 31 bp, Artificial Sequence
  Description of Artificial Sequence:  Enzymatic Nucleic Acid
ccaggacgggctagctacaacgacctcctag

SEQ ID NO: 4293 - DNA, 31 bp, Artificial Sequence
  Description of Artificial Sequence:  Enzymatic Nucleic Acid
gaccaggaggctagctacaacgagccctcct

SEQ ID NO: 4294 - DNA, 31 bp, Artificial Sequence
  Description of Artificial Sequence:  Enzymatic Nucleic Acid
ctggaggaggctagctacaacgacaggacgc

SEQ ID NO: 4295 - DNA, 31 bp, Artificial Sequence
  Description of Artificial Sequence:  Enzymatic Nucleic Acid
tgaaaccaggctagctacaacgactccctct

SEQ ID NO: 4296 - DNA, 31 bp, Artificial Sequence
  Description of Artificial Sequence:  Enzymatic Nucleic Acid
ccctgaaaggctagctacaacgacacctccc

SEQ ID NO: 4297 - DNA, 31 bp, Artificial Sequence
  Description of Artificial Sequence:  Enzymatic Nucleic Acid
atccccaaggctagctacaacgaccctgaaa

SEQ ID NO: 4298 - DNA, 31 bp, Artificial Sequence
  Description of Artificial Sequence:  Enzymatic Nucleic Acid
ggcacagaggctagctacaacgaccccaacc

SEQ ID NO: 4299 - DNA, 31 bp, Artificial Sequence
  Description of Artificial Sequence:  Enzymatic Nucleic Acid
caccggcaggctagctacaacgaagatcccc

SEQ ID NO: 4300 - DNA, 31 bp, Artificial Sequence
  Description of Artificial Sequence:  Enzymatic Nucleic Acid
gccaccggggctagctacaacgaacagatcc

SEQ ID NO: 4301 - DNA, 31 bp, Artificial Sequence
  Description of Artificial Sequence:  Enzymatic Nucleic Acid
cagagccaggctagctacaacgacggcacag

SEQ ID NO: 4302 - DNA, 31 bp, Artificial Sequence
  Description of Artificial Sequence:  Enzymatic Nucleic Acid
gaccagagggctagctacaacgacaccggca

SEQ ID NO: 4303 - DNA, 31 bp, Artificial Sequence
  Description of Artificial Sequence:  Enzymatic Nucleic Acid
agcagagaggctagctacaacgacagagcca

SEQ ID NO: 4304 - DNA, 31 bp, Artificial Sequence
  Description of Artificial Sequence:  Enzymatic Nucleic Acid
gctcccagggctagctacaacgaagagacca

SEQ ID NO: 4305 - DNA, 31 bp, Artificial Sequence
  Description of Artificial Sequence:  Enzymatic Nucleic Acid
caagaaggggctagctacaacgatcccagca

SEQ ID NO: 4306 - DNA, 31 bp, Artificial Sequence
  Description of Artificial Sequence:  Enzymatic Nucleic Acid
tctcaccgggctagctacaacgacaagaagg

SEQ ID NO: 4307 - DNA, 31 bp, Artificial Sequence
  Description of Artificial Sequence:  Enzymatic Nucleic Acid
gcctctcaggctagctacaacgacgccaaga

SEQ ID NO: 4308 - DNA, 31 bp, Artificial Sequence
  Description of Artificial Sequence:  Enzymatic Nucleic Acid
aggtgatgggctagctacaacgactctcacc

SEQ ID NO: 4309 - DNA, 31 bp, Artificial Sequence
  Description of Artificial Sequence:  Enzymatic Nucleic Acid
aaaggtgaggctagctacaacgagcctctca

SEQ ID NO: 4310 - DNA, 31 bp, Artificial Sequence
  Description of Artificial Sequence:  Enzymatic Nucleic Acid
aggaaaggggctagctacaacgagatgcctc

SEQ ID NO: 4311 - DNA, 31 bp, Artificial Sequence
  Description of Artificial Sequence:  Enzymatic Nucleic Acid
ggagcaagggctagctacaacgacaggaaag

SEQ ID NO: 4312 - DNA, 31 bp, Artificial Sequence
  Description of Artificial Sequence:  Enzymatic Nucleic Acid
gctgggagggctagctacaacgaaagtcagg

SEQ ID NO: 4313 - DNA, 31 bp, Artificial Sequence
  Description of Artificial Sequence:  Enzymatic Nucleic Acid
atttcacgggctagctacaacgatgggagca

SEQ ID NO: 4314 - DNA, 31 bp, Artificial Sequence
  Description of Artificial Sequence:  Enzymatic Nucleic Acid
gcatttcaggctagctacaacgagctgggag

SEQ ID NO: 4315 - DNA, 31 bp, Artificial Sequence
  Description of Artificial Sequence:  Enzymatic Nucleic Acid
caggtgcaggctagctacaacgattcacgct

SEQ ID NO: 4316 - DNA, 31 bp, Artificial Sequence
  Description of Artificial Sequence:  Enzymatic Nucleic Acid
ggcaggtgggctagctacaacgaatttcacg

SEQ ID NO: 4317 - DNA, 31 bp, Artificial Sequence
  Description of Artificial Sequence:  Enzymatic Nucleic Acid
ttggcaggggctagctacaacgagcatttca

SEQ ID NO: 4318 - DNA, 31 bp, Artificial Sequence
  Description of Artificial Sequence:  Enzymatic Nucleic Acid
attcttggggctagctacaacgaaggtgcat

SEQ ID NO: 4319 - DNA, 31 bp, Artificial Sequence
  Description of Artificial Sequence:  Enzymatic Nucleic Acid
gtctgccaggctagctacaacgatcttggca

SEQ ID NO: 4320 - DNA, 31 bp, Artificial Sequence
  Description of Artificial Sequence:  Enzymatic Nucleic Acid
tatgtctgggctagctacaacgacattcttg

SEQ ID NO: 4321 - DNA, 31 bp, Artificial Sequence
  Description of Artificial Sequence:  Enzymatic Nucleic Acid
tccctatgggctagctacaacgactgccatt

SEQ ID NO: 4322 - DNA, 31 bp, Artificial Sequence
  Description of Artificial Sequence:  Enzymatic Nucleic Acid
ggtccctaggctagctacaacgagtctgcca

SEQ ID NO: 4323 - DNA, 31 bp, Artificial Sequence
  Description of Artificial Sequence:  Enzymatic Nucleic Acid
aggcggggggctagctacaacgaccctatgt

SEQ ID NO: 4324 - DNA, 31 bp, Artificial Sequence
  Description of Artificial Sequence:  Enzymatic Nucleic Acid
ccaggaggggctagctacaacgaggggtccc

SEQ ID NO: 4325 - DNA, 31 bp, Artificial Sequence
  Description of Artificial Sequence:  Enzymatic Nucleic Acid
tgtgaaggggctagctacaacgaccaggagg

SEQ ID NO: 4326 - DNA, 31 bp, Artificial Sequence
  Description of Artificial Sequence:  Enzymatic Nucleic Acid
tgggcatgggctagctacaacgagaaggccc

SEQ ID NO: 4327 - DNA, 31 bp, Artificial Sequence
  Description of Artificial Sequence:  Enzymatic Nucleic Acid
actgggcaggctagctacaacgagtgaaggc

SEQ ID NO: 4328 - DNA, 31 bp, Artificial Sequence
  Description of Artificial Sequence:  Enzymatic Nucleic Acid
aaactgggggctagctacaacgaatgtgaag

SEQ ID NO: 4329 - DNA, 31 bp, Artificial Sequence
  Description of Artificial Sequence:  Enzymatic Nucleic Acid
gaagaaaaggctagctacaacgatgggcatg

SEQ ID NO: 4330 - DNA, 31 bp, Artificial Sequence
  Description of Artificial Sequence:  Enzymatic Nucleic Acid
ccacagagggctagctacaacgacgaagaaa

SEQ ID NO: 4331 - DNA, 31 bp, Artificial Sequence
  Description of Artificial Sequence:  Enzymatic Nucleic Acid
tcaggccaggctagctacaacgaagagccga

SEQ ID NO: 4332 - DNA, 31 bp, Artificial Sequence
  Description of Artificial Sequence:  Enzymatic Nucleic Acid
gcttcaggggctagctacaacgacacagagc

SEQ ID NO: 4333 - DNA, 31 bp, Artificial Sequence
  Description of Artificial Sequence:  Enzymatic Nucleic Acid
acagaccgggctagctacaacgattcaggcc

SEQ ID NO: 4334 - DNA, 31 bp, Artificial Sequence
  Description of Artificial Sequence:  Enzymatic Nucleic Acid
tccacagaggctagctacaacgacgcttcag

SEQ ID NO: 4335 - DNA, 31 bp, Artificial Sequence
  Description of Artificial Sequence:  Enzymatic Nucleic Acid
aaggtccaggctagctacaacgaagaccgct

SEQ ID NO: 4336 - DNA, 31 bp, Artificial Sequence
  Description of Artificial Sequence:  Enzymatic Nucleic Acid
ttccaaggggctagctacaacgaccacagac

SEQ ID NO: 4337 - DNA, 31 bp, Artificial Sequence
  Description of Artificial Sequence:  Enzymatic Nucleic Acid
gagccctaggctagctacaacgattccaagg

SEQ ID NO: 4338 - DNA, 31 bp, Artificial Sequence
  Description of Artificial Sequence:  Enzymatic Nucleic Acid
tgctggagggctagctacaacgacctacttc

SEQ ID NO: 4339 - DNA, 31 bp, Artificial Sequence
  Description of Artificial Sequence:  Enzymatic Nucleic Acid
agtcggtgggctagctacaacgatggagccc

SEQ ID NO: 4340 - DNA, 31 bp, Artificial Sequence
  Description of Artificial Sequence:  Enzymatic Nucleic Acid
ccagtcggggctagctacaacgagctggagc

SEQ ID NO: 4341 - DNA, 31 bp, Artificial Sequence
  Description of Artificial Sequence:  Enzymatic Nucleic Acid
gaggccagggctagctacaacgacggtgctg

SEQ ID NO: 4342 - DNA, 31 bp, Artificial Sequence
  Description of Artificial Sequence:  Enzymatic Nucleic Acid
gcctgaggggctagctacaacgacagtcggt

SEQ ID NO: 4343 - DNA, 31 bp, Artificial Sequence
  Description of Artificial Sequence:  Enzymatic Nucleic Acid
ggcagaggggctagctacaacgactgaggcc

SEQ ID NO: 4344 - DNA, 31 bp, Artificial Sequence
  Description of Artificial Sequence:  Enzymatic Nucleic Acid
caatgaggggctagctacaacgaagaggcct

SEQ ID NO: 4345 - DNA, 31 bp, Artificial Sequence
  Description of Artificial Sequence:  Enzymatic Nucleic Acid
accaccaaggctagctacaacgagaggcaga

SEQ ID NO: 4346 - DNA, 31 bp, Artificial Sequence
  Description of Artificial Sequence:  Enzymatic Nucleic Acid
cccgaccaggctagctacaacgacaatgagg

SEQ ID NO: 4347 - DNA, 31 bp, Artificial Sequence
  Description of Artificial Sequence:  Enzymatic Nucleic Acid
ctacccgaggctagctacaacgacaccaatg

SEQ ID NO: 4348 - DNA, 31 bp, Artificial Sequence
  Description of Artificial Sequence:  Enzymatic Nucleic Acid
ggccgctaggctagctacaacgaccgaccac

SEQ ID NO: 4349 - DNA, 31 bp, Artificial Sequence
  Description of Artificial Sequence:  Enzymatic Nucleic Acid
actggccgggctagctacaacgatacccgac

SEQ ID NO: 4350 - DNA, 31 bp, Artificial Sequence
  Description of Artificial Sequence:  Enzymatic Nucleic Acid
cctactggggctagctacaacgacgctaccc

SEQ ID NO: 4351 - DNA, 31 bp, Artificial Sequence
  Description of Artificial Sequence:  Enzymatic Nucleic Acid
acgccctaggctagctacaacgatggccgct

SEQ ID NO: 4352 - DNA, 31 bp, Artificial Sequence
  Description of Artificial Sequence:  Enzymatic Nucleic Acid
ctcccacgggctagctacaacgacctactgg

SEQ ID NO: 4353 - DNA, 31 bp, Artificial Sequence
  Description of Artificial Sequence:  Enzymatic Nucleic Acid
ggctcccaggctagctacaacgagccctact

SEQ ID NO: 4354 - DNA, 31 bp, Artificial Sequence
  Description of Artificial Sequence:  Enzymatic Nucleic Acid
tggccaggggctagctacaacgatcccacgc

SEQ ID NO: 4355 - DNA, 31 bp, Artificial Sequence
  Description of Artificial Sequence:  Enzymatic Nucleic Acid
agggatggggctagctacaacgacaggctcc

SEQ ID NO: 4356 - DNA, 31 bp, Artificial Sequence
  Description of Artificial Sequence:  Enzymatic Nucleic Acid
ggcagggaggctagctacaacgaggccaggc

SEQ ID NO: 4357 - DNA, 31 bp, Artificial Sequence
  Description of Artificial Sequence:  Enzymatic Nucleic Acid
ccaggaggggctagctacaacgaagggatgg

SEQ ID NO: 4358 - DNA, 31 bp, Artificial Sequence
  Description of Artificial Sequence:  Enzymatic Nucleic Acid
ctcgtccaggctagctacaacgatccaggag

SEQ ID NO: 4359 - DNA, 31 bp, Artificial Sequence
  Description of Artificial Sequence:  Enzymatic Nucleic Acid
caacctcgggctagctacaacgaccactcca

SEQ ID NO: 4360 - DNA, 31 bp, Artificial Sequence
  Description of Artificial Sequence:  Enzymatic Nucleic Acid
gctgccaaggctagctacaacgactcgtcca

SEQ ID NO: 4361 - DNA, 31 bp, Artificial Sequence
  Description of Artificial Sequence:  Enzymatic Nucleic Acid
accagctgggctagctacaacgacaacctcg

SEQ ID NO: 4362 - DNA, 31 bp, Artificial Sequence
  Description of Artificial Sequence:  Enzymatic Nucleic Acid
cggaccagggctagctacaacgatgccaacc

SEQ ID NO: 4363 - DNA, 31 bp, Artificial Sequence
  Description of Artificial Sequence:  Enzymatic Nucleic Acid
cagacggaggctagctacaacgacagctgcc

SEQ ID NO: 4364 - DNA, 31 bp, Artificial Sequence
  Description of Artificial Sequence:  Enzymatic Nucleic Acid
ggagcagaggctagctacaacgaggaccagc

SEQ ID NO: 4365 - DNA, 31 bp, Artificial Sequence
  Description of Artificial Sequence:  Enzymatic Nucleic Acid
ggcaggagggctagctacaacgaagacggac

SEQ ID NO: 4366 - DNA, 31 bp, Artificial Sequence
  Description of Artificial Sequence:  Enzymatic Nucleic Acid
gagtggggggctagctacaacgaaggagcag

SEQ ID NO: 4367 - DNA, 31 bp, Artificial Sequence
  Description of Artificial Sequence:  Enzymatic Nucleic Acid
ggggagagggctagctacaacgaggggcagg

SEQ ID NO: 4368 - DNA, 31 bp, Artificial Sequence
  Description of Artificial Sequence:  Enzymatic Nucleic Acid
ggcaggggggctagctacaacgagggggaga

SEQ ID NO: 4369 - DNA, 31 bp, Artificial Sequence
  Description of Artificial Sequence:  Enzymatic Nucleic Acid
ggtgagggggctagctacaacgaaggggcgg

SEQ ID NO: 4370 - DNA, 31 bp, Artificial Sequence
  Description of Artificial Sequence:  Enzymatic Nucleic Acid
gggtagggggctagctacaacgagagggcag

SEQ ID NO: 4371 - DNA, 31 bp, Artificial Sequence
  Description of Artificial Sequence:  Enzymatic Nucleic Acid
ggcaagggggctagctacaacgaagggtgag

SEQ ID NO: 4372 - DNA, 31 bp, Artificial Sequence
  Description of Artificial Sequence:  Enzymatic Nucleic Acid
gcgtggggggctagctacaacgaaagggtag

SEQ ID NO: 4373 - DNA, 31 bp, Artificial Sequence
  Description of Artificial Sequence:  Enzymatic Nucleic Acid
ggcaggcgggctagctacaacgaggggcaag

SEQ ID NO: 4374 - DNA, 31 bp, Artificial Sequence
  Description of Artificial Sequence:  Enzymatic Nucleic Acid
gaggcaggggctagctacaacgagtggggca

SEQ ID NO: 4375 - DNA, 31 bp, Artificial Sequence
  Description of Artificial Sequence:  Enzymatic Nucleic Acid
ccatgaggggctagctacaacgaaggcgtgg

SEQ ID NO: 4376 - DNA, 31 bp, Artificial Sequence
  Description of Artificial Sequence:  Enzymatic Nucleic Acid
accagccaggctagctacaacgagaggcagg

SEQ ID NO: 4377 - DNA, 31 bp, Artificial Sequence
  Description of Artificial Sequence:  Enzymatic Nucleic Acid
gcaaccagggctagctacaacgacatgaggc

SEQ ID NO: 4378 - DNA, 31 bp, Artificial Sequence
  Description of Artificial Sequence:  Enzymatic Nucleic Acid
aagagcaaggctagctacaacgacagccatg

SEQ ID NO: 4379 - DNA, 31 bp, Artificial Sequence
  Description of Artificial Sequence:  Enzymatic Nucleic Acid
tccaagagggctagctacaacgaaaccagcc

SEQ ID NO: 4380 - DNA, 31 bp, Artificial Sequence
  Description of Artificial Sequence:  Enzymatic Nucleic Acid
ctaccaggggctagctacaacgatccaagag

SEQ ID NO: 4381 - DNA, 31 bp, Artificial Sequence
  Description of Artificial Sequence:  Enzymatic Nucleic Acid
tgacactaggctagctacaacgacaggctcc

SEQ ID NO: 4382 - DNA, 31 bp, Artificial Sequence
  Description of Artificial Sequence:  Enzymatic Nucleic Acid
cagtgacaggctagctacaacgataccaggc

SEQ ID NO: 4383 - DNA, 31 bp, Artificial Sequence
  Description of Artificial Sequence:  Enzymatic Nucleic Acid
gccagtgaggctagctacaacgaactaccag

SEQ ID NO: 4384 - DNA, 31 bp, Artificial Sequence
  Description of Artificial Sequence:  Enzymatic Nucleic Acid
tgagccagggctagctacaacgagacactac

SEQ ID NO: 4385 - DNA, 31 bp, Artificial Sequence
  Description of Artificial Sequence:  Enzymatic Nucleic Acid
aggctgagggctagctacaacgacagtgaca

SEQ ID NO: 4386 - DNA, 31 bp, Artificial Sequence
  Description of Artificial Sequence:  Enzymatic Nucleic Acid
cagcaaggggctagctacaacgatgagccag

SEQ ID NO: 4387 - DNA, 31 bp, Artificial Sequence
  Description of Artificial Sequence:  Enzymatic Nucleic Acid
atacccagggctagctacaacgaaaggctga

SEQ ID NO: 4388 - DNA, 31 bp, Artificial Sequence
  Description of Artificial Sequence:  Enzymatic Nucleic Acid
tgtgtataggctagctacaacgaccagcaag

SEQ ID NO: 4389 - DNA, 31 bp, Artificial Sequence
  Description of Artificial Sequence:  Enzymatic Nucleic Acid
cctgtgtaggctagctacaacgaacccagca

SEQ ID NO: 4390 - DNA, 31 bp, Artificial Sequence
  Description of Artificial Sequence:  Enzymatic Nucleic Acid
agcctgtgggctagctacaacgaatacccag

SEQ ID NO: 4391 - DNA, 31 bp, Artificial Sequence
  Description of Artificial Sequence:  Enzymatic Nucleic Acid
agagcctgggctagctacaacgagtataccc

SEQ ID NO: 4392 - DNA, 31 bp, Artificial Sequence
  Description of Artificial Sequence:  Enzymatic Nucleic Acid
tggcagagggctagctacaacgactgtgtat

SEQ ID NO: 4393 - DNA, 31 bp, Artificial Sequence
  Description of Artificial Sequence:  Enzymatic Nucleic Acid
gtgggtggggctagctacaacgaagagcctg

SEQ ID NO: 4394 - DNA, 31 bp, Artificial Sequence
  Description of Artificial Sequence:  Enzymatic Nucleic Acid
agagtgggggctagctacaacgaggcagagc

SEQ ID NO: 4395 - DNA, 31 bp, Artificial Sequence
  Description of Artificial Sequence:  Enzymatic Nucleic Acid
gagcagagggctagctacaacgagggtggca

SEQ ID NO: 4396 - DNA, 31 bp, Artificial Sequence
  Description of Artificial Sequence:  Enzymatic Nucleic Acid
ccttggagggctagctacaacgaagagtggg

SEQ ID NO: 4397 - DNA, 31 bp, Artificial Sequence
  Description of Artificial Sequence:  Enzymatic Nucleic Acid
agggcaagggctagctacaacgacccttgga

SEQ ID NO: 4398 - DNA, 31 bp, Artificial Sequence
  Description of Artificial Sequence:  Enzymatic Nucleic Acid
aggcagggggctagctacaacgaaagcccct

SEQ ID NO: 4399 - DNA, 31 bp, Artificial Sequence
  Description of Artificial Sequence:  Enzymatic Nucleic Acid
gcccaaggggctagctacaacgaagggcaag

SEQ ID NO: 4400 - DNA, 31 bp, Artificial Sequence
  Description of Artificial Sequence:  Enzymatic Nucleic Acid
gaacttggggctagctacaacgaccaaggca

SEQ ID NO: 4401 - DNA, 31 bp, Artificial Sequence
  Description of Artificial Sequence:  Enzymatic Nucleic Acid
acctagaaggctagctacaacgattggccca

SEQ ID NO: 4402 - DNA, 31 bp, Artificial Sequence
  Description of Artificial Sequence:  Enzymatic Nucleic Acid
tggccagaggctagctacaacgactagaact

SEQ ID NO: 4403 - DNA, 31 bp, Artificial Sequence
  Description of Artificial Sequence:  Enzymatic Nucleic Acid
ggctgtggggctagctacaacgacagaccta

SEQ ID NO: 4404 - DNA, 31 bp, Artificial Sequence
  Description of Artificial Sequence:  Enzymatic Nucleic Acid
tgtggctgggctagctacaacgaggccagac

SEQ ID NO: 4405 - DNA, 31 bp, Artificial Sequence
  Description of Artificial Sequence:  Enzymatic Nucleic Acid
gtctgtggggctagctacaacgatgtggcca

SEQ ID NO: 4406 - DNA, 31 bp, Artificial Sequence
  Description of Artificial Sequence:  Enzymatic Nucleic Acid
gctgtctgggctagctacaacgaggctgtgg

SEQ ID NO: 4407 - DNA, 31 bp, Artificial Sequence
  Description of Artificial Sequence:  Enzymatic Nucleic Acid
ctgagctgggctagctacaacgactgtggct

SEQ ID NO: 4408 - DNA, 31 bp, Artificial Sequence
  Description of Artificial Sequence:  Enzymatic Nucleic Acid
ggactgagggctagctacaacgatgtctgtg

SEQ ID NO: 4409 - DNA, 31 bp, Artificial Sequence
  Description of Artificial Sequence:  Enzymatic Nucleic Acid
acaggggaggctagctacaacgatgagctgt

SEQ ID NO: 4410 - DNA, 31 bp, Artificial Sequence
  Description of Artificial Sequence:  Enzymatic Nucleic Acid
tgaccacaggctagctacaacgaaggggact

SEQ ID NO: 4411 - DNA, 31 bp, Artificial Sequence
  Description of Artificial Sequence:  Enzymatic Nucleic Acid
gatgaccaggctagctacaacgaacagggga

SEQ ID NO: 4412 - DNA, 31 bp, Artificial Sequence
  Description of Artificial Sequence:  Enzymatic Nucleic Acid
caggatgaggctagctacaacgacacacagg

SEQ ID NO: 4413 - DNA, 31 bp, Artificial Sequence
  Description of Artificial Sequence:  Enzymatic Nucleic Acid
agccaggaggctagctacaacgagaccacac

SEQ ID NO: 4414 - DNA, 31 bp, Artificial Sequence
  Description of Artificial Sequence:  Enzymatic Nucleic Acid
agcagaagggctagctacaacgacaggatga

SEQ ID NO: 4415 - DNA, 31 bp, Artificial Sequence
  Description of Artificial Sequence:  Enzymatic Nucleic Acid
gcccccagggctagctacaacgaagaagcca

SEQ ID NO: 4416 - DNA, 31 bp, Artificial Sequence
  Description of Artificial Sequence:  Enzymatic Nucleic Acid
gctgtgggggctagctacaacgaccccagca

SEQ ID NO: 4417 - DNA, 31 bp, Artificial Sequence
  Description of Artificial Sequence:  Enzymatic Nucleic Acid
gggcgctgggctagctacaacgagggccccc

SEQ ID NO: 4418 - DNA, 31 bp, Artificial Sequence
  Description of Artificial Sequence:  Enzymatic Nucleic Acid
caggggcgggctagctacaacgatgtgggcc

SEQ ID NO: 4419 - DNA, 31 bp, Artificial Sequence
  Description of Artificial Sequence:  Enzymatic Nucleic Acid
accaggggggctagctacaacgagctgtggg

SEQ ID NO: 4420 - DNA, 31 bp, Artificial Sequence
  Description of Artificial Sequence:  Enzymatic Nucleic Acid
gaggggcaggctagctacaacgacaggggcg

SEQ ID NO: 4421 - DNA, 31 bp, Artificial Sequence
  Description of Artificial Sequence:  Enzymatic Nucleic Acid
gggaggggggctagctacaacgaaccagggg

SEQ ID NO: 4422 - DNA, 31 bp, Artificial Sequence
  Description of Artificial Sequence:  Enzymatic Nucleic Acid
aacccgggggctagctacaacgacctgggag

SEQ ID NO: 4423 - DNA, 31 bp, Artificial Sequence
  Description of Artificial Sequence:  Enzymatic Nucleic Acid
agcctcaaggctagctacaacgaccgggccc

SEQ ID NO: 4424 - DNA, 31 bp, Artificial Sequence
  Description of Artificial Sequence:  Enzymatic Nucleic Acid
tggcccagggctagctacaacgactcaaccc

SEQ ID NO: 4425 - DNA, 31 bp, Artificial Sequence
  Description of Artificial Sequence:  Enzymatic Nucleic Acid
gggcctggggctagctacaacgaccagcctc

SEQ ID NO: 4426 - DNA, 31 bp, Artificial Sequence
  Description of Artificial Sequence:  Enzymatic Nucleic Acid
ccagagggggctagctacaacgactggccca

SEQ ID NO: 4427 - DNA, 31 bp, Artificial Sequence
  Description of Artificial Sequence:  Enzymatic Nucleic Acid
agtccccgggctagctacaacgacccagagg

SEQ ID NO: 4428 - DNA, 31 bp, Artificial Sequence
  Description of Artificial Sequence:  Enzymatic Nucleic Acid
ggcacaagggctagctacaacgaccccgtcc

SEQ ID NO: 4429 - DNA, 31 bp, Artificial Sequence
  Description of Artificial Sequence:  Enzymatic Nucleic Acid
acagggcaggctagctacaacgaaagtcccc

SEQ ID NO: 4430 - DNA, 31 bp, Artificial Sequence
  Description of Artificial Sequence:  Enzymatic Nucleic Acid
tgacagggggctagctacaacgaacaagtcc

SEQ ID NO: 4431 - DNA, 31 bp, Artificial Sequence
  Description of Artificial Sequence:  Enzymatic Nucleic Acid
aaccctgaggctagctacaacgaagggcaca

SEQ ID NO: 4432 - DNA, 31 bp, Artificial Sequence
  Description of Artificial Sequence:  Enzymatic Nucleic Acid
atagggaaggctagctacaacgacctgacag

SEQ ID NO: 4433 - DNA, 31 bp, Artificial Sequence
  Description of Artificial Sequence:  Enzymatic Nucleic Acid
ctcagggaggctagctacaacgaagggaacc

SEQ ID NO: 4434 - DNA, 31 bp, Artificial Sequence
  Description of Artificial Sequence:  Enzymatic Nucleic Acid
tcccccaaggctagctacaacgactcaggga

SEQ ID NO: 4435 - DNA, 31 bp, Artificial Sequence
  Description of Artificial Sequence:  Enzymatic Nucleic Acid
cctgctagggctagctacaacgatctccccc

SEQ ID NO: 4436 - DNA, 31 bp, Artificial Sequence
  Description of Artificial Sequence:  Enzymatic Nucleic Acid
atgccctgggctagctacaacgatagctctc

SEQ ID NO: 4437 - DNA, 31 bp, Artificial Sequence
  Description of Artificial Sequence:  Enzymatic Nucleic Acid
gcggcatgggctagctacaacgacctgctag

SEQ ID NO: 4438 - DNA, 31 bp, Artificial Sequence
  Description of Artificial Sequence:  Enzymatic Nucleic Acid
cagcggcaggctagctacaacgagccctgct

SEQ ID NO: 4439 - DNA, 31 bp, Artificial Sequence
  Description of Artificial Sequence:  Enzymatic Nucleic Acid
gccagcggggctagctacaacgaatgccctg

SEQ ID NO: 4440 - DNA, 31 bp, Artificial Sequence
  Description of Artificial Sequence:  Enzymatic Nucleic Acid
ccagccagggctagctacaacgaggcatgcc

SEQ ID NO: 4441 - DNA, 31 bp, Artificial Sequence
  Description of Artificial Sequence:  Enzymatic Nucleic Acid
ctggccagggctagctacaacgacagcggca

SEQ ID NO: 4442 - DNA, 31 bp, Artificial Sequence
  Description of Artificial Sequence:  Enzymatic Nucleic Acid
agccctggggctagctacaacgacagccagc

SEQ ID NO: 4443 - DNA, 31 bp, Artificial Sequence
  Description of Artificial Sequence:  Enzymatic Nucleic Acid
ccctgcagggctagctacaacgacctggcca

SEQ ID NO: 4444 - DNA, 31 bp, Artificial Sequence
  Description of Artificial Sequence:  Enzymatic Nucleic Acid
tgtccctgggctagctacaacgaagccctgg

SEQ ID NO: 4445 - DNA, 31 bp, Artificial Sequence
  Description of Artificial Sequence:  Enzymatic Nucleic Acid
ggggagtgggctagctacaacgaccctgcag

SEQ ID NO: 4446 - DNA, 31 bp, Artificial Sequence
  Description of Artificial Sequence:  Enzymatic Nucleic Acid
agggggagggctagctacaacgagtccctgc

SEQ ID NO: 4447 - DNA, 31 bp, Artificial Sequence
  Description of Artificial Sequence:  Enzymatic Nucleic Acid
tccctggaggctagctacaacgaaaaagggg

SEQ ID NO: 4448 - DNA, 31 bp, Artificial Sequence
  Description of Artificial Sequence:  Enzymatic Nucleic Acid
gtgtggtaggctagctacaacgatccctgga

SEQ ID NO: 4449 - DNA, 31 bp, Artificial Sequence
  Description of Artificial Sequence:  Enzymatic Nucleic Acid
gagtgtggggctagctacaacgaattccctg

SEQ ID NO: 4450 - DNA, 31 bp, Artificial Sequence
  Description of Artificial Sequence:  Enzymatic Nucleic Acid
ggcgagtgggctagctacaacgaggtattcc

SEQ ID NO: 4451 - DNA, 31 bp, Artificial Sequence
  Description of Artificial Sequence:  Enzymatic Nucleic Acid
agggcgagggctagctacaacgagtggtatt

SEQ ID NO: 4452 - DNA, 31 bp, Artificial Sequence
  Description of Artificial Sequence:  Enzymatic Nucleic Acid
gagaagggggctagctacaacgagagtgtgg

SEQ ID NO: 4453 - DNA, 31 bp, Artificial Sequence
  Description of Artificial Sequence:  Enzymatic Nucleic Acid
ggtgttcgggctagctacaacgatggagaga

SEQ ID NO: 4454 - DNA, 31 bp, Artificial Sequence
  Description of Artificial Sequence:  Enzymatic Nucleic Acid
gtgtggtgggctagctacaacgatcgctgga

SEQ ID NO: 4455 - DNA, 31 bp, Artificial Sequence
  Description of Artificial Sequence:  Enzymatic Nucleic Acid
gagtgtggggctagctacaacgagttcgctg

SEQ ID NO: 4456 - DNA, 31 bp, Artificial Sequence
  Description of Artificial Sequence:  Enzymatic Nucleic Acid
ggcgagtgggctagctacaacgaggtgttcg

SEQ ID NO: 4457 - DNA, 31 bp, Artificial Sequence
  Description of Artificial Sequence:  Enzymatic Nucleic Acid
agggcgagggctagctacaacgagtggtgtt

SEQ ID NO: 4458 - DNA, 31 bp, Artificial Sequence
  Description of Artificial Sequence:  Enzymatic Nucleic Acid
gtgtggcgggctagctacaacgacccctgga

SEQ ID NO: 4459 - DNA, 31 bp, Artificial Sequence
  Description of Artificial Sequence:  Enzymatic Nucleic Acid
gagtgtggggctagctacaacgagtcccctg

SEQ ID NO: 4460 - DNA, 31 bp, Artificial Sequence
  Description of Artificial Sequence:  Enzymatic Nucleic Acid
ggggagtgggctagctacaacgaggcgtccc

SEQ ID NO: 4461 - DNA, 31 bp, Artificial Sequence
  Description of Artificial Sequence:  Enzymatic Nucleic Acid
agggggagggctagctacaacgagtggcgtc

SEQ ID NO: 4462 - DNA, 31 bp, Artificial Sequence
  Description of Artificial Sequence:  Enzymatic Nucleic Acid
cccctggaggctagctacaacgaagaagggg

SEQ ID NO: 4463 - DNA, 31 bp, Artificial Sequence
  Description of Artificial Sequence:  Enzymatic Nucleic Acid
ggcgagtgggctagctacaacgaggcgtccc

SEQ ID NO: 4464 - DNA, 31 bp, Artificial Sequence
  Description of Artificial Sequence:  Enzymatic Nucleic Acid
agggcgagggctagctacaacgagtggcgtc

SEQ ID NO: 4465 - DNA, 31 bp, Artificial Sequence
  Description of Artificial Sequence:  Enzymatic Nucleic Acid
cagaagggggctagctacaacgagagtgtgg

SEQ ID NO: 4466 - DNA, 31 bp, Artificial Sequence
  Description of Artificial Sequence:  Enzymatic Nucleic Acid
cccctggaggctagctacaacgaagaagggc

SEQ ID NO: 4467 - DNA, 31 bp, Artificial Sequence
  Description of Artificial Sequence:  Enzymatic Nucleic Acid
aagtgtggggctagctacaacgagtcccctg

SEQ ID NO: 4468 - DNA, 31 bp, Artificial Sequence
  Description of Artificial Sequence:  Enzymatic Nucleic Acid
ggcaagtgggctagctacaacgaggcgtccc

SEQ ID NO: 4469 - DNA, 31 bp, Artificial Sequence
  Description of Artificial Sequence:  Enzymatic Nucleic Acid
agggcaagggctagctacaacgagtggcgtc

SEQ ID NO: 4470 - DNA, 31 bp, Artificial Sequence
  Description of Artificial Sequence:  Enzymatic Nucleic Acid
cagaagggggctagctacaacgaaagtgtgg

SEQ ID NO: 4471 - DNA, 31 bp, Artificial Sequence
  Description of Artificial Sequence:  Enzymatic Nucleic Acid
tccctggaggctagctacaacgaagaagggc

SEQ ID NO: 4472 - DNA, 31 bp, Artificial Sequence
  Description of Artificial Sequence:  Enzymatic Nucleic Acid
gtgtggcaggctagctacaacgatccctgga

SEQ ID NO: 4473 - DNA, 31 bp, Artificial Sequence
  Description of Artificial Sequence:  Enzymatic Nucleic Acid
ggggagtgggctagctacaacgaggcattcc

SEQ ID NO: 4474 - DNA, 31 bp, Artificial Sequence
  Description of Artificial Sequence:  Enzymatic Nucleic Acid
agggggagggctagctacaacgagtggcatt

SEQ ID NO: 4475 - DNA, 31 bp, Artificial Sequence
  Description of Artificial Sequence:  Enzymatic Nucleic Acid
ggaggctgggctagctacaacgatggggaga

SEQ ID NO: 4476 - DNA, 31 bp, Artificial Sequence
  Description of Artificial Sequence:  Enzymatic Nucleic Acid
ctcggaggggctagctacaacgatgctgggg

SEQ ID NO: 4477 - DNA, 31 bp, Artificial Sequence
  Description of Artificial Sequence:  Enzymatic Nucleic Acid
gctggtcaggctagctacaacgatcggaggc

SEQ ID NO: 4478 - DNA, 31 bp, Artificial Sequence
  Description of Artificial Sequence:  Enzymatic Nucleic Acid
gaagctggggctagctacaacgacactcgga

SEQ ID NO: 4479 - DNA, 31 bp, Artificial Sequence
  Description of Artificial Sequence:  Enzymatic Nucleic Acid
tggggaagggctagctacaacgatggtcact

SEQ ID NO: 4480 - DNA, 31 bp, Artificial Sequence
  Description of Artificial Sequence:  Enzymatic Nucleic Acid
tctatcgaggctagctacaacgaggggaagc

SEQ ID NO: 4481 - DNA, 31 bp, Artificial Sequence
  Description of Artificial Sequence:  Enzymatic Nucleic Acid
gaagtctaggctagctacaacgacgatgggg

SEQ ID NO: 4482 - DNA, 31 bp, Artificial Sequence
  Description of Artificial Sequence:  Enzymatic Nucleic Acid
tcgggaagggctagctacaacgactatcgat

SEQ ID NO: 4483 - DNA, 31 bp, Artificial Sequence
  Description of Artificial Sequence:  Enzymatic Nucleic Acid
gctcctggggctagctacaacgactcgggaa

SEQ ID NO: 4484 - DNA, 31 bp, Artificial Sequence
  Description of Artificial Sequence:  Enzymatic Nucleic Acid
ctagagggggctagctacaacgatcctggcc

SEQ ID NO: 4485 - DNA, 31 bp, Artificial Sequence
  Description of Artificial Sequence:  Enzymatic Nucleic Acid
cccggcagggctagctacaacgacctagagg

SEQ ID NO: 4486 - DNA, 31 bp, Artificial Sequence
  Description of Artificial Sequence:  Enzymatic Nucleic Acid
gcacccggggctagctacaacgaagccctag

SEQ ID NO: 4487 - DNA, 31 bp, Artificial Sequence
  Description of Artificial Sequence:  Enzymatic Nucleic Acid
gggtggcaggctagctacaacgaccggcagc

SEQ ID NO: 4488 - DNA, 31 bp, Artificial Sequence
  Description of Artificial Sequence:  Enzymatic Nucleic Acid
cagggtggggctagctacaacgaacccggca

SEQ ID NO: 4489 - DNA, 31 bp, Artificial Sequence
  Description of Artificial Sequence:  Enzymatic Nucleic Acid
agccagggggctagctacaacgaggcacccg

SEQ ID NO: 4490 - DNA, 31 bp, Artificial Sequence
  Description of Artificial Sequence:  Enzymatic Nucleic Acid
ggaaggagggctagctacaacgacagggtgg

SEQ ID NO: 4491 - DNA, 31 bp, Artificial Sequence
  Description of Artificial Sequence:  Enzymatic Nucleic Acid
gcacggtgggctagctacaacgaggaaggag

SEQ ID NO: 4492 - DNA, 31 bp, Artificial Sequence
  Description of Artificial Sequence:  Enzymatic Nucleic Acid
cagcacggggctagctacaacgagtggaagg

SEQ ID NO: 4493 - DNA, 31 bp, Artificial Sequence
  Description of Artificial Sequence:  Enzymatic Nucleic Acid
gaccagcaggctagctacaacgaggtgtgga

SEQ ID NO: 4494 - DNA, 31 bp, Artificial Sequence
  Description of Artificial Sequence:  Enzymatic Nucleic Acid
gtgaccagggctagctacaacgaacggtgtg

SEQ ID NO: 4495 - DNA, 31 bp, Artificial Sequence
  Description of Artificial Sequence:  Enzymatic Nucleic Acid
ggcagtgaggctagctacaacgacagcacgg

SEQ ID NO: 4496 - DNA, 31 bp, Artificial Sequence
  Description of Artificial Sequence:  Enzymatic Nucleic Acid
gcaggcagggctagctacaacgagaccagca

SEQ ID NO: 4497 - DNA, 31 bp, Artificial Sequence
  Description of Artificial Sequence:  Enzymatic Nucleic Acid
ccagcaggggctagctacaacgaagtgacca

SEQ ID NO: 4498 - DNA, 31 bp, Artificial Sequence
  Description of Artificial Sequence:  Enzymatic Nucleic Acid
gcccccagggctagctacaacgaaggcagtg

SEQ ID NO: 4499 - DNA, 31 bp, Artificial Sequence
  Description of Artificial Sequence:  Enzymatic Nucleic Acid
atctgacgggctagctacaacgaccccagca

SEQ ID NO: 4500 - DNA, 31 bp, Artificial Sequence
  Description of Artificial Sequence:  Enzymatic Nucleic Acid
gcatctgaggctagctacaacgagcccccag

SEQ ID NO: 4501 - DNA, 31 bp, Artificial Sequence
  Description of Artificial Sequence:  Enzymatic Nucleic Acid
cacctgcaggctagctacaacgactgacgcc

SEQ ID NO: 4502 - DNA, 31 bp, Artificial Sequence
  Description of Artificial Sequence:  Enzymatic Nucleic Acid
gtcacctgggctagctacaacgaatctgacg

SEQ ID NO: 4503 - DNA, 31 bp, Artificial Sequence
  Description of Artificial Sequence:  Enzymatic Nucleic Acid
cagggtcaggctagctacaacgactgcatct

SEQ ID NO: 4504 - DNA, 31 bp, Artificial Sequence
  Description of Artificial Sequence:  Enzymatic Nucleic Acid
gcacagggggctagctacaacgacacctgca

SEQ ID NO: 4505 - DNA, 31 bp, Artificial Sequence
  Description of Artificial Sequence:  Enzymatic Nucleic Acid
ctcctgcaggctagctacaacgaagggtcac

SEQ ID NO: 4506 - DNA, 31 bp, Artificial Sequence
  Description of Artificial Sequence:  Enzymatic Nucleic Acid
acctcctgggctagctacaacgaacagggtc

SEQ ID NO: 4507 - DNA, 31 bp, Artificial Sequence
  Description of Artificial Sequence:  Enzymatic Nucleic Acid
cagagataggctagctacaacgactcctgca

SEQ ID NO: 4508 - DNA, 31 bp, Artificial Sequence
  Description of Artificial Sequence:  Enzymatic Nucleic Acid
tccagagaggctagctacaacgaacctcctg

SEQ ID NO: 4509 - DNA, 31 bp, Artificial Sequence
  Description of Artificial Sequence:  Enzymatic Nucleic Acid
gaggcaggggctagctacaacgaccagagat

SEQ ID NO: 4510 - DNA, 31 bp, Artificial Sequence
  Description of Artificial Sequence:  Enzymatic Nucleic Acid
ccaagaggggctagctacaacgaaggtccag

SEQ ID NO: 4511 - DNA, 31 bp, Artificial Sequence
  Description of Artificial Sequence:  Enzymatic Nucleic Acid
cgtaatgaggctagctacaacgacaagaggc

SEQ ID NO: 4512 - DNA, 31 bp, Artificial Sequence
  Description of Artificial Sequence:  Enzymatic Nucleic Acid
ccccgtaaggctagctacaacgagaccaaga

SEQ ID NO: 4513 - DNA, 31 bp, Artificial Sequence
  Description of Artificial Sequence:  Enzymatic Nucleic Acid
cagccccgggctagctacaacgaaatgacca

SEQ ID NO: 4514 - DNA, 31 bp, Artificial Sequence
  Description of Artificial Sequence:  Enzymatic Nucleic Acid
ctgcccagggctagctacaacgacccgtaat

SEQ ID NO: 4515 - DNA, 31 bp, Artificial Sequence
  Description of Artificial Sequence:  Enzymatic Nucleic Acid
aggccctgggctagctacaacgaccagcccc

SEQ ID NO: 4516 - DNA, 31 bp, Artificial Sequence
  Description of Artificial Sequence:  Enzymatic Nucleic Acid
ataccaggggctagctacaacgacctgccca

SEQ ID NO: 4517 - DNA, 31 bp, Artificial Sequence
  Description of Artificial Sequence:  Enzymatic Nucleic Acid
ccctgataggctagctacaacgacaggccct

SEQ ID NO: 4518 - DNA, 31 bp, Artificial Sequence
  Description of Artificial Sequence:  Enzymatic Nucleic Acid
ggccctgaggctagctacaacgaaccaggcc

SEQ ID NO: 4519 - DNA, 31 bp, Artificial Sequence
  Description of Artificial Sequence:  Enzymatic Nucleic Acid
cagcggggggctagctacaacgacctgatac

SEQ ID NO: 4520 - DNA, 31 bp, Artificial Sequence
  Description of Artificial Sequence:  Enzymatic Nucleic Acid
aaccccagggctagctacaacgaggggccct

SEQ ID NO: 4521 - DNA, 31 bp, Artificial Sequence
  Description of Artificial Sequence:  Enzymatic Nucleic Acid
ccctgcaaggctagctacaacgacccagcgg

SEQ ID NO: 4522 - DNA, 31 bp, Artificial Sequence
  Description of Artificial Sequence:  Enzymatic Nucleic Acid
cagccctgggctagctacaacgaaaccccag

SEQ ID NO: 4523 - DNA, 31 bp, Artificial Sequence
  Description of Artificial Sequence:  Enzymatic Nucleic Acid
aggcccagggctagctacaacgacctgcaac

SEQ ID NO: 4524 - DNA, 31 bp, Artificial Sequence
  Description of Artificial Sequence:  Enzymatic Nucleic Acid
agcacaggggctagctacaacgaccagccct

SEQ ID NO: 4525 - DNA, 31 bp, Artificial Sequence
  Description of Artificial Sequence:  Enzymatic Nucleic Acid
ccacagcaggctagctacaacgaaggcccag

SEQ ID NO: 4526 - DNA, 31 bp, Artificial Sequence
  Description of Artificial Sequence:  Enzymatic Nucleic Acid
gaccacagggctagctacaacgaacaggccc

SEQ ID NO: 4527 - DNA, 31 bp, Artificial Sequence
  Description of Artificial Sequence:  Enzymatic Nucleic Acid
caggaccaggctagctacaacgaagcacagg

SEQ ID NO: 4528 - DNA, 31 bp, Artificial Sequence
  Description of Artificial Sequence:  Enzymatic Nucleic Acid
ccccaggaggctagctacaacgacacagcac

SEQ ID NO: 4529 - DNA, 31 bp, Artificial Sequence
  Description of Artificial Sequence:  Enzymatic Nucleic Acid
cctggacaggctagctacaacgacccaggac

SEQ ID NO: 4530 - DNA, 31 bp, Artificial Sequence
  Description of Artificial Sequence:  Enzymatic Nucleic Acid
gtcctggaggctagctacaacgaaccccagg

SEQ ID NO: 4531 - DNA, 31 bp, Artificial Sequence
  Description of Artificial Sequence:  Enzymatic Nucleic Acid
cacgtctgggctagctacaacgacctggaca

SEQ ID NO: 4532 - DNA, 31 bp, Artificial Sequence
  Description of Artificial Sequence:  Enzymatic Nucleic Acid
cctccacgggctagctacaacgactgtcctg

SEQ ID NO: 4533 - DNA, 31 bp, Artificial Sequence
  Description of Artificial Sequence:  Enzymatic Nucleic Acid
cccctccaggctagctacaacgagtctgtcc

SEQ ID NO: 4534 - DNA, 31 bp, Artificial Sequence
  Description of Artificial Sequence:  Enzymatic Nucleic Acid
ggccctgaggctagctacaacgaccctccac

SEQ ID NO: 4535 - DNA, 31 bp, Artificial Sequence
  Description of Artificial Sequence:  Enzymatic Nucleic Acid
gtgctgggggctagctacaacgacctgaccc

SEQ ID NO: 4536 - DNA, 31 bp, Artificial Sequence
  Description of Artificial Sequence:  Enzymatic Nucleic Acid
caggggtgggctagctacaacgatgggccct

SEQ ID NO: 4537 - DNA, 31 bp, Artificial Sequence
  Description of Artificial Sequence:  Enzymatic Nucleic Acid
agcaggggggctagctacaacgagctgggcc

SEQ ID NO: 4538 - DNA, 31 bp, Artificial Sequence
  Description of Artificial Sequence:  Enzymatic Nucleic Acid
gcatggagggctagctacaacgaaggggtgc

SEQ ID NO: 4539 - DNA, 31 bp, Artificial Sequence
  Description of Artificial Sequence:  Enzymatic Nucleic Acid
gttcagcaggctagctacaacgaggagcagg

SEQ ID NO: 4540 - DNA, 31 bp, Artificial Sequence
  Description of Artificial Sequence:  Enzymatic Nucleic Acid
cagttcagggctagctacaacgaatggagca

SEQ ID NO: 4541 - DNA, 31 bp, Artificial Sequence
  Description of Artificial Sequence:  Enzymatic Nucleic Acid
tcccacagggctagctacaacgatcagcatg

SEQ ID NO: 4542 - DNA, 31 bp, Artificial Sequence
  Description of Artificial Sequence:  Enzymatic Nucleic Acid
gcttcccaggctagctacaacgaagttcagc

SEQ ID NO: 4543 - DNA, 31 bp, Artificial Sequence
  Description of Artificial Sequence:  Enzymatic Nucleic Acid
cctggatgggctagctacaacgattcccaca

SEQ ID NO: 4544 - DNA, 31 bp, Artificial Sequence
  Description of Artificial Sequence:  Enzymatic Nucleic Acid
gacctggaggctagctacaacgagcttccca

SEQ ID NO: 4545 - DNA, 31 bp, Artificial Sequence
  Description of Artificial Sequence:  Enzymatic Nucleic Acid
cccagggaggctagctacaacgactggatgc

SEQ ID NO: 4546 - DNA, 31 bp, Artificial Sequence
  Description of Artificial Sequence:  Enzymatic Nucleic Acid
tgaagccaggctagctacaacgaccagggac

SEQ ID NO: 4547 - DNA, 31 bp, Artificial Sequence
  Description of Artificial Sequence:  Enzymatic Nucleic Acid
tgttgaagggctagctacaacgacacccagg

SEQ ID NO: 4548 - DNA, 31 bp, Artificial Sequence
  Description of Artificial Sequence:  Enzymatic Nucleic Acid
aactcctgggctagctacaacgatgaagcca

SEQ ID NO: 4549 - DNA, 31 bp, Artificial Sequence
  Description of Artificial Sequence:  Enzymatic Nucleic Acid
tgctggaaggctagctacaacgatcctgttg

SEQ ID NO: 4550 - DNA, 31 bp, Artificial Sequence
  Description of Artificial Sequence:  Enzymatic Nucleic Acid
ttcccgtgggctagctacaacgatggaactc

SEQ ID NO: 4551 - DNA, 31 bp, Artificial Sequence
  Description of Artificial Sequence:  Enzymatic Nucleic Acid
ggttcccgggctagctacaacgagctggaac

SEQ ID NO: 4552 - DNA, 31 bp, Artificial Sequence
  Description of Artificial Sequence:  Enzymatic Nucleic Acid
tccagtggggctagctacaacgatcccgtgc

SEQ ID NO: 4553 - DNA, 31 bp, Artificial Sequence
  Description of Artificial Sequence:  Enzymatic Nucleic Acid
ttgtccagggctagctacaacgaggttcccg

SEQ ID NO: 4554 - DNA, 31 bp, Artificial Sequence
  Description of Artificial Sequence:  Enzymatic Nucleic Acid
ccaggttgggctagctacaacgaccagtggt

SEQ ID NO: 4555 - DNA, 31 bp, Artificial Sequence
  Description of Artificial Sequence:  Enzymatic Nucleic Acid
accccaggggctagctacaacgatgtccagt

SEQ ID NO: 4556 - DNA, 31 bp, Artificial Sequence
  Description of Artificial Sequence:  Enzymatic Nucleic Acid
aggacacaggctagctacaacgacccaggtt

SEQ ID NO: 4557 - DNA, 31 bp, Artificial Sequence
  Description of Artificial Sequence:  Enzymatic Nucleic Acid
tcaggacaggctagctacaacgaaccccagg

SEQ ID NO: 4558 - DNA, 31 bp, Artificial Sequence
  Description of Artificial Sequence:  Enzymatic Nucleic Acid
gatcaggaggctagctacaacgaacacccca

SEQ ID NO: 4559 - DNA, 31 bp, Artificial Sequence
  Description of Artificial Sequence:  Enzymatic Nucleic Acid
tccccagaggctagctacaacgacaggacac

SEQ ID NO: 4560 - DNA, 31 bp, Artificial Sequence
  Description of Artificial Sequence:  Enzymatic Nucleic Acid
ctggcctgggctagctacaacgaccccagat

SEQ ID NO: 4561 - DNA, 31 bp, Artificial Sequence
  Description of Artificial Sequence:  Enzymatic Nucleic Acid
gtggctggggctagctacaacgactgtcccc

SEQ ID NO: 4562 - DNA, 31 bp, Artificial Sequence
  Description of Artificial Sequence:  Enzymatic Nucleic Acid
gggtgtggggctagctacaacgatggcctgt

SEQ ID NO: 4563 - DNA, 31 bp, Artificial Sequence
  Description of Artificial Sequence:  Enzymatic Nucleic Acid
tcggggtgggctagctacaacgaggctggcc

SEQ ID NO: 4564 - DNA, 31 bp, Artificial Sequence
  Description of Artificial Sequence:  Enzymatic Nucleic Acid
actcggggggctagctacaacgagtggctgg

SEQ ID NO: 4565 - DNA, 31 bp, Artificial Sequence
  Description of Artificial Sequence:  Enzymatic Nucleic Acid
ccctaggaggctagctacaacgatcggggtg

SEQ ID NO: 4566 - DNA, 31 bp, Artificial Sequence
  Description of Artificial Sequence:  Enzymatic Nucleic Acid
ctctggagggctagctacaacgaccctagga

SEQ ID NO: 4567 - DNA, 31 bp, Artificial Sequence
  Description of Artificial Sequence:  Enzymatic Nucleic Acid
gtgggctgggctagctacaacgatctctgga

SEQ ID NO: 4568 - DNA, 31 bp, Artificial Sequence
  Description of Artificial Sequence:  Enzymatic Nucleic Acid
gcagtgggggctagctacaacgatgctctct

SEQ ID NO: 4569 - DNA, 31 bp, Artificial Sequence
  Description of Artificial Sequence:  Enzymatic Nucleic Acid
cagggcagggctagctacaacgagggctgct

SEQ ID NO: 4570 - DNA, 31 bp, Artificial Sequence
  Description of Artificial Sequence:  Enzymatic Nucleic Acid
gcccagggggctagctacaacgaagtgggct

SEQ ID NO: 4571 - DNA, 31 bp, Artificial Sequence
  Description of Artificial Sequence:  Enzymatic Nucleic Acid
ccgtggagggctagctacaacgaccagggca

SEQ ID NO: 4572 - DNA, 31 bp, Artificial Sequence
  Description of Artificial Sequence:  Enzymatic Nucleic Acid
ggcttccgggctagctacaacgaggagccca

SEQ ID NO: 4573 - DNA, 31 bp, Artificial Sequence
  Description of Artificial Sequence:  Enzymatic Nucleic Acid
tgagggggggctagctacaacgattccgtgg

SEQ ID NO: 4574 - DNA, 31 bp, Artificial Sequence
  Description of Artificial Sequence:  Enzymatic Nucleic Acid
tagcggcaggctagctacaacgagagggggc

SEQ ID NO: 4575 - DNA, 31 bp, Artificial Sequence
  Description of Artificial Sequence:  Enzymatic Nucleic Acid
cctagcggggctagctacaacgaatgagggg

SEQ ID NO: 4576 - DNA, 31 bp, Artificial Sequence
  Description of Artificial Sequence:  Enzymatic Nucleic Acid
aggcctagggctagctacaacgaggcatgag

SEQ ID NO: 4577 - DNA, 31 bp, Artificial Sequence
  Description of Artificial Sequence:  Enzymatic Nucleic Acid
ggccaaggggctagctacaacgactagcggc

SEQ ID NO: 4578 - DNA, 31 bp, Artificial Sequence
  Description of Artificial Sequence:  Enzymatic Nucleic Acid
ccccgaggggctagctacaacgacaaggcct

SEQ ID NO: 4579 - DNA, 31 bp, Artificial Sequence
  Description of Artificial Sequence:  Enzymatic Nucleic Acid
ctgggctgggctagctacaacgaccccgagg

SEQ ID NO: 4580 - DNA, 31 bp, Artificial Sequence
  Description of Artificial Sequence:  Enzymatic Nucleic Acid
tagctgggggctagctacaacgatgtccccg

SEQ ID NO: 4581 - DNA, 31 bp, Artificial Sequence
  Description of Artificial Sequence:  Enzymatic Nucleic Acid
tggcctagggctagctacaacgatgggctgt

SEQ ID NO: 4582 - DNA, 31 bp, Artificial Sequence
  Description of Artificial Sequence:  Enzymatic Nucleic Acid
cacactggggctagctacaacgactagctgg

SEQ ID NO: 4583 - DNA, 31 bp, Artificial Sequence
  Description of Artificial Sequence:  Enzymatic Nucleic Acid
gccacacaggctagctacaacgatggcctag

SEQ ID NO: 4584 - DNA, 31 bp, Artificial Sequence
  Description of Artificial Sequence:  Enzymatic Nucleic Acid
ctgccacaggctagctacaacgaactggcct

SEQ ID NO: 4585 - DNA, 31 bp, Artificial Sequence
  Description of Artificial Sequence:  Enzymatic Nucleic Acid
tcctgccaggctagctacaacgaacactggc

SEQ ID NO: 4586 - DNA, 31 bp, Artificial Sequence
  Description of Artificial Sequence:  Enzymatic Nucleic Acid
tggtcctgggctagctacaacgacacacact

SEQ ID NO: 4587 - DNA, 31 bp, Artificial Sequence
  Description of Artificial Sequence:  Enzymatic Nucleic Acid
gggcctggggctagctacaacgacctgccac

SEQ ID NO: 4588 - DNA, 31 bp, Artificial Sequence
  Description of Artificial Sequence:  Enzymatic Nucleic Acid
catgggggggctagctacaacgactggtcct

SEQ ID NO: 4589 - DNA, 31 bp, Artificial Sequence
  Description of Artificial Sequence:  Enzymatic Nucleic Acid
ctcccacaggctagctacaacgagggggcct

SEQ ID NO: 4590 - DNA, 31 bp, Artificial Sequence
  Description of Artificial Sequence:  Enzymatic Nucleic Acid
agctcccaggctagctacaacgaatgggggc

SEQ ID NO: 4591 - DNA, 31 bp, Artificial Sequence
  Description of Artificial Sequence:  Enzymatic Nucleic Acid
ggggtcagggctagctacaacgatcccacat

SEQ ID NO: 4592 - DNA, 31 bp, Artificial Sequence
  Description of Artificial Sequence:  Enzymatic Nucleic Acid
ccaaggggggctagctacaacgacagctccc

SEQ ID NO: 4593 - DNA, 31 bp, Artificial Sequence
  Description of Artificial Sequence:  Enzymatic Nucleic Acid
ctccagaaggctagctacaacgacccaaggg

SEQ ID NO: 4594 - DNA, 31 bp, Artificial Sequence
  Description of Artificial Sequence:  Enzymatic Nucleic Acid
cagcacagggctagctacaacgatccagaat

SEQ ID NO: 4595 - DNA, 31 bp, Artificial Sequence
  Description of Artificial Sequence:  Enzymatic Nucleic Acid
catcagcaggctagctacaacgaagctccag

SEQ ID NO: 4596 - DNA, 31 bp, Artificial Sequence
  Description of Artificial Sequence:  Enzymatic Nucleic Acid
cccatcagggctagctacaacgaacagctcc

SEQ ID NO: 4597 - DNA, 31 bp, Artificial Sequence
  Description of Artificial Sequence:  Enzymatic Nucleic Acid
cctgcccaggctagctacaacgacagcacag

SEQ ID NO: 4598 - DNA, 31 bp, Artificial Sequence
  Description of Artificial Sequence:  Enzymatic Nucleic Acid
ctcccctgggctagctacaacgaccatcagc

SEQ ID NO: 4599 - DNA, 31 bp, Artificial Sequence
  Description of Artificial Sequence:  Enzymatic Nucleic Acid
ggagctggggctagctacaacgatctcccct

SEQ ID NO: 4600 - DNA, 31 bp, Artificial Sequence
  Description of Artificial Sequence:  Enzymatic Nucleic Acid
gggaggagggctagctacaacgatggctctc

SEQ ID NO: 4601 - DNA, 31 bp, Artificial Sequence
  Description of Artificial Sequence:  Enzymatic Nucleic Acid
catcaagaggctagctacaacgacctccctc

SEQ ID NO: 4602 - DNA, 31 bp, Artificial Sequence
  Description of Artificial Sequence:  Enzymatic Nucleic Acid
cccaggcaggctagctacaacgacaagaccc

SEQ ID NO: 4603 - DNA, 31 bp, Artificial Sequence
  Description of Artificial Sequence:  Enzymatic Nucleic Acid
accccaggggctagctacaacgaatcaagac

SEQ ID NO: 4604 - DNA, 31 bp, Artificial Sequence
  Description of Artificial Sequence:  Enzymatic Nucleic Acid
gcgggtaaggctagctacaacgacccaggca

SEQ ID NO: 4605 - DNA, 31 bp, Artificial Sequence
  Description of Artificial Sequence:  Enzymatic Nucleic Acid
tctgcgggggctagctacaacgaaaccccag

SEQ ID NO: 4606 - DNA, 31 bp, Artificial Sequence
  Description of Artificial Sequence:  Enzymatic Nucleic Acid
ggcctctgggctagctacaacgagggtaacc

SEQ ID NO: 4607 - DNA, 31 bp, Artificial Sequence
  Description of Artificial Sequence:  Enzymatic Nucleic Acid
cacccaggggctagctacaacgactctgcgg

SEQ ID NO: 4608 - DNA, 31 bp, Artificial Sequence
  Description of Artificial Sequence:  Enzymatic Nucleic Acid
tcccggcaggctagctacaacgaccaggcct

SEQ ID NO: 4609 - DNA, 31 bp, Artificial Sequence
  Description of Artificial Sequence:  Enzymatic Nucleic Acid
cgtcccggggctagctacaacgaacccaggc

SEQ ID NO: 4610 - DNA, 31 bp, Artificial Sequence
  Description of Artificial Sequence:  Enzymatic Nucleic Acid
ggggagcgggctagctacaacgacccggcac

SEQ ID NO: 4611 - DNA, 31 bp, Artificial Sequence
  Description of Artificial Sequence:  Enzymatic Nucleic Acid
ccggggagggctagctacaacgagtcccggc

SEQ ID NO: 4612 - DNA, 31 bp, Artificial Sequence
  Description of Artificial Sequence:  Enzymatic Nucleic Acid
cagccaaaggctagctacaacgacggggagc

SEQ ID NO: 4613 - DNA, 31 bp, Artificial Sequence
  Description of Artificial Sequence:  Enzymatic Nucleic Acid
cctttcagggctagctacaacgacaaaccgg

SEQ ID NO: 4614 - DNA, 31 bp, Artificial Sequence
  Description of Artificial Sequence:  Enzymatic Nucleic Acid
cacatctgggctagctacaacgatttccttt

SEQ ID NO: 4615 - DNA, 31 bp, Artificial Sequence
  Description of Artificial Sequence:  Enzymatic Nucleic Acid
tgaccacaggctagctacaacgactgctttc

SEQ ID NO: 4616 - DNA, 31 bp, Artificial Sequence
  Description of Artificial Sequence:  Enzymatic Nucleic Acid
gctgaccaggctagctacaacgaatctgctt

SEQ ID NO: 4617 - DNA, 31 bp, Artificial Sequence
  Description of Artificial Sequence:  Enzymatic Nucleic Acid
gaagctgaggctagctacaacgacacatctg

SEQ ID NO: 4618 - DNA, 31 bp, Artificial Sequence
  Description of Artificial Sequence:  Enzymatic Nucleic Acid
tggagaagggctagctacaacgatgaccaca

SEQ ID NO: 4619 - DNA, 31 bp, Artificial Sequence
  Description of Artificial Sequence:  Enzymatic Nucleic Acid
gggctcagggctagctacaacgaggagaagc

SEQ ID NO: 4620 - DNA, 31 bp, Artificial Sequence
  Description of Artificial Sequence:  Enzymatic Nucleic Acid
cagatgggggctagctacaacgatcagtgga

SEQ ID NO: 4621 - DNA, 31 bp, Artificial Sequence
  Description of Artificial Sequence:  Enzymatic Nucleic Acid
agaccagaggctagctacaacgagggctcag

SEQ ID NO: 4622 - DNA, 31 bp, Artificial Sequence
  Description of Artificial Sequence:  Enzymatic Nucleic Acid
cgggaagaggctagctacaacgacagatggg

SEQ ID NO: 4623 - DNA, 31 bp, Artificial Sequence
  Description of Artificial Sequence:  Enzymatic Nucleic Acid
gggcccagggctagctacaacgacccgggaa

SEQ ID NO: 4624 - DNA, 31 bp, Artificial Sequence
  Description of Artificial Sequence:  Enzymatic Nucleic Acid
ctatggggggctagctacaacgaccagcccc

SEQ ID NO: 4625 - DNA, 31 bp, Artificial Sequence
  Description of Artificial Sequence:  Enzymatic Nucleic Acid
cagatctaggctagctacaacgaggggccca

SEQ ID NO: 4626 - DNA, 31 bp, Artificial Sequence
  Description of Artificial Sequence:  Enzymatic Nucleic Acid
gacccagaggctagctacaacgactatgggg

SEQ ID NO: 4627 - DNA, 31 bp, Artificial Sequence
  Description of Artificial Sequence:  Enzymatic Nucleic Acid
cacagggaggctagctacaacgaccagatct

SEQ ID NO: 4628 - DNA, 31 bp, Artificial Sequence
  Description of Artificial Sequence:  Enzymatic Nucleic Acid
gggccacaggctagctacaacgaagggaccc

SEQ ID NO: 4629 - DNA, 31 bp, Artificial Sequence
  Description of Artificial Sequence:  Enzymatic Nucleic Acid
gggggccaggctagctacaacgaacagggac

SEQ ID NO: 4630 - DNA, 31 bp, Artificial Sequence
  Description of Artificial Sequence:  Enzymatic Nucleic Acid
caggggggggctagctacaacgacacacagg

SEQ ID NO: 4631 - DNA, 31 bp, Artificial Sequence
  Description of Artificial Sequence:  Enzymatic Nucleic Acid
gcatcagaggctagctacaacgacagggggg

SEQ ID NO: 4632 - DNA, 31 bp, Artificial Sequence
  Description of Artificial Sequence:  Enzymatic Nucleic Acid
cctcggcaggctagctacaacgacagaccag

SEQ ID NO: 4633 - DNA, 31 bp, Artificial Sequence
  Description of Artificial Sequence:  Enzymatic Nucleic Acid
atcctcggggctagctacaacgaatcagacc

SEQ ID NO: 4634 - DNA, 31 bp, Artificial Sequence
  Description of Artificial Sequence:  Enzymatic Nucleic Acid
caggggtaggctagctacaacgacctcggca

SEQ ID NO: 4635 - DNA, 31 bp, Artificial Sequence
  Description of Artificial Sequence:  Enzymatic Nucleic Acid
tgcaggggggctagctacaacgaatcctcgg

SEQ ID NO: 4636 - DNA, 31 bp, Artificial Sequence
  Description of Artificial Sequence:  Enzymatic Nucleic Acid
gcagtttgggctagctacaacgaaggggtat

SEQ ID NO: 4637 - DNA, 31 bp, Artificial Sequence
  Description of Artificial Sequence:  Enzymatic Nucleic Acid
attggcagggctagctacaacgattgcaggg

SEQ ID NO: 4638 - DNA, 31 bp, Artificial Sequence
  Description of Artificial Sequence:  Enzymatic Nucleic Acid
gggattggggctagctacaacgaagtttgca

SEQ ID NO: 4639 - DNA, 31 bp, Artificial Sequence
  Description of Artificial Sequence:  Enzymatic Nucleic Acid
ctctgggaggctagctacaacgatggcagtt

SEQ ID NO: 4640 - DNA, 31 bp, Artificial Sequence
  Description of Artificial Sequence:  Enzymatic Nucleic Acid
cagtcttgggctagctacaacgacctctggg

SEQ ID NO: 4641 - DNA, 31 bp, Artificial Sequence
  Description of Artificial Sequence:  Enzymatic Nucleic Acid
cttcccagggctagctacaacgacttgtcct

SEQ ID NO: 4642 - DNA, 31 bp, Artificial Sequence
  Description of Artificial Sequence:  Enzymatic Nucleic Acid
tgcagggaggctagctacaacgattcccagt

SEQ ID NO: 4643 - DNA, 31 bp, Artificial Sequence
  Description of Artificial Sequence:  Enzymatic Nucleic Acid
tctccctgggctagctacaacgaagggactt

SEQ ID NO: 4644 - DNA, 31 bp, Artificial Sequence
  Description of Artificial Sequence:  Enzymatic Nucleic Acid
gggatgggggctagctacaacgatctccctg

SEQ ID NO: 4645 - DNA, 31 bp, Artificial Sequence
  Description of Artificial Sequence:  Enzymatic Nucleic Acid
tgcggggaggctagctacaacgagggctctc

SEQ ID NO: 4646 - DNA, 31 bp, Artificial Sequence
  Description of Artificial Sequence:  Enzymatic Nucleic Acid
tcagggtgggctagctacaacgaggggatgg

SEQ ID NO: 4647 - DNA, 31 bp, Artificial Sequence
  Description of Artificial Sequence:  Enzymatic Nucleic Acid
ggtcagggggctagctacaacgagcggggat

SEQ ID NO: 4648 - DNA, 31 bp, Artificial Sequence
  Description of Artificial Sequence:  Enzymatic Nucleic Acid
cttgtgggggctagctacaacgacagggtgc

SEQ ID NO: 4649 - DNA, 31 bp, Artificial Sequence
  Description of Artificial Sequence:  Enzymatic Nucleic Acid
ccctcttgggctagctacaacgagggtcagg

SEQ ID NO: 4650 - DNA, 31 bp, Artificial Sequence
  Description of Artificial Sequence:  Enzymatic Nucleic Acid
agcaggagggctagctacaacgaccctcttg

SEQ ID NO: 4651 - DNA, 31 bp, Artificial Sequence
  Description of Artificial Sequence:  Enzymatic Nucleic Acid
gtgggcagggctagctacaacgaaggagtcc

SEQ ID NO: 4652 - DNA, 31 bp, Artificial Sequence
  Description of Artificial Sequence:  Enzymatic Nucleic Acid
ctggtgggggctagctacaacgaagcaggag

SEQ ID NO: 4653 - DNA, 31 bp, Artificial Sequence
  Description of Artificial Sequence:  Enzymatic Nucleic Acid
atgcctggggctagctacaacgagggcagca

SEQ ID NO: 4654 - DNA, 31 bp, Artificial Sequence
  Description of Artificial Sequence:  Enzymatic Nucleic Acid
gagggatgggctagctacaacgactggtggg

SEQ ID NO: 4655 - DNA, 31 bp, Artificial Sequence
  Description of Artificial Sequence:  Enzymatic Nucleic Acid
tggagggaggctagctacaacgagcctggtg

SEQ ID NO: 4656 - RNA, 17 nt, Homo sapiens
aaggggagguaacccug

SEQ ID NO: 4657 - RNA, 17 nt, Homo sapiens
gggagguaacccuggcc

SEQ ID NO: 4658 - RNA, 17 nt, Homo sapiens
uaacccuggccccuuug

SEQ ID NO: 4659 - RNA, 17 nt, Homo sapiens
ccccuuuggucggggcc

SEQ ID NO: 4660 - RNA, 17 nt, Homo sapiens
uggucggggccccgggc

SEQ ID NO: 4661 - RNA, 17 nt, Homo sapiens
ggccccgggcagccgcg

SEQ ID NO: 4662 - RNA, 17 nt, Homo sapiens
cccgggcagccgcgcgc

SEQ ID NO: 4663 - RNA, 17 nt, Homo sapiens
gggcagccgcgcgcccc

SEQ ID NO: 4664 - RNA, 17 nt, Homo sapiens
gcagccgcgcgccccuu

SEQ ID NO: 4665 - RNA, 17 nt, Homo sapiens
agccgcgcgccccuucc

SEQ ID NO: 4666 - RNA, 17 nt, Homo sapiens
cccuucccacggggccc

SEQ ID NO: 4667 - RNA, 17 nt, Homo sapiens
cccacggggcccuuuac

SEQ ID NO: 4668 - RNA, 17 nt, Homo sapiens
ggcccuuuacugcgccg

SEQ ID NO: 4669 - RNA, 17 nt, Homo sapiens
ccuuuacugcgccgcgc

SEQ ID NO: 4670 - RNA, 17 nt, Homo sapiens
uuuacugcgccgcgcgc

SEQ ID NO: 4671 - RNA, 17 nt, Homo sapiens
acugcgccgcgcgcccg

SEQ ID NO: 4672 - RNA, 17 nt, Homo sapiens
ugcgccgcgcgcccggc

SEQ ID NO: 4673 - RNA, 17 nt, Homo sapiens
cgccgcgcgcccggccc

SEQ ID NO: 4674 - RNA, 17 nt, Homo sapiens
cgcgcccggcccccacc

SEQ ID NO: 4675 - RNA, 17 nt, Homo sapiens
cggcccccaccccucgc

SEQ ID NO: 4676 - RNA, 17 nt, Homo sapiens
caccccucgcagcaccc

SEQ ID NO: 4677 - RNA, 17 nt, Homo sapiens
cccucgcagcaccccgc

SEQ ID NO: 4678 - RNA, 17 nt, Homo sapiens
cucgcagcaccccgcgc

SEQ ID NO: 4679 - RNA, 17 nt, Homo sapiens
agcaccccgcgccccgc

SEQ ID NO: 4680 - RNA, 17 nt, Homo sapiens
caccccgcgccccgcgc

SEQ ID NO: 4681 - RNA, 17 nt, Homo sapiens
cgcgccccgcgcccucc

SEQ ID NO: 4682 - RNA, 17 nt, Homo sapiens
cgccccgcgcccuccca

SEQ ID NO: 4683 - RNA, 17 nt, Homo sapiens
cccucccagccgggucc

SEQ ID NO: 4684 - RNA, 17 nt, Homo sapiens
ccagccggguccagccg

SEQ ID NO: 4685 - RNA, 17 nt, Homo sapiens
cggguccagccggagcc

SEQ ID NO: 4686 - RNA, 17 nt, Homo sapiens
cagccggagccaugggg

SEQ ID NO: 4687 - RNA, 17 nt, Homo sapiens
ccggagccauggggccg

SEQ ID NO: 4688 - RNA, 17 nt, Homo sapiens
gccauggggccggagcc

SEQ ID NO: 4689 - RNA, 17 nt, Homo sapiens
gggccggagccgcagug

SEQ ID NO: 4690 - RNA, 17 nt, Homo sapiens
ccggagccgcagugagc

SEQ ID NO: 4691 - RNA, 17 nt, Homo sapiens
gagccgcagugagcacc

SEQ ID NO: 4692 - RNA, 17 nt, Homo sapiens
cgcagugagcaccaugg

SEQ ID NO: 4693 - RNA, 17 nt, Homo sapiens
cagugagcaccauggag

SEQ ID NO: 4694 - RNA, 17 nt, Homo sapiens
ugagcaccauggagcug

SEQ ID NO: 4695 - RNA, 17 nt, Homo sapiens
accauggagcuggcggc

SEQ ID NO: 4696 - RNA, 17 nt, Homo sapiens
uggagcuggcggccuug

SEQ ID NO: 4697 - RNA, 17 nt, Homo sapiens
agcuggcggccuugugc

SEQ ID NO: 4698 - RNA, 17 nt, Homo sapiens
gcggccuugugccgcug

SEQ ID NO: 4699 - RNA, 17 nt, Homo sapiens
ggccuugugccgcuggg

SEQ ID NO: 4700 - RNA, 17 nt, Homo sapiens
cuugugccgcugggggc

SEQ ID NO: 4701 - RNA, 17 nt, Homo sapiens
cgcugggggcuccuccu

SEQ ID NO: 4702 - RNA, 17 nt, Homo sapiens
uccuccucgcccucuug

SEQ ID NO: 4703 - RNA, 17 nt, Homo sapiens
gcccucuugccccccgg

SEQ ID NO: 4704 - RNA, 17 nt, Homo sapiens
cccccggagccgcgagc

SEQ ID NO: 4705 - RNA, 17 nt, Homo sapiens
ccggagccgcgagcacc

SEQ ID NO: 4706 - RNA, 17 nt, Homo sapiens
agccgcgagcacccaag

SEQ ID NO: 4707 - RNA, 17 nt, Homo sapiens
ccgcgagcacccaagug

SEQ ID NO: 4708 - RNA, 17 nt, Homo sapiens
gcacccaagugugcacc

SEQ ID NO: 4709 - RNA, 17 nt, Homo sapiens
acccaagugugcaccgg

SEQ ID NO: 4710 - RNA, 17 nt, Homo sapiens
ccaagugugcaccggca

SEQ ID NO: 4711 - RNA, 17 nt, Homo sapiens
aagugugcaccggcaca

SEQ ID NO: 4712 - RNA, 17 nt, Homo sapiens
gugcaccggcacagaca

SEQ ID NO: 4713 - RNA, 17 nt, Homo sapiens
gcaccggcacagacaug

SEQ ID NO: 4714 - RNA, 17 nt, Homo sapiens
cggcacagacaugaagc

SEQ ID NO: 4715 - RNA, 17 nt, Homo sapiens
gcacagacaugaagcug

SEQ ID NO: 4716 - RNA, 17 nt, Homo sapiens
gacaugaagcugcggcu

SEQ ID NO: 4717 - RNA, 17 nt, Homo sapiens
augaagcugcggcuccc

SEQ ID NO: 4718 - RNA, 17 nt, Homo sapiens
aagcugcggcucccugc

SEQ ID NO: 4719 - RNA, 17 nt, Homo sapiens
ggcucccugccaguccc

SEQ ID NO: 4720 - RNA, 17 nt, Homo sapiens
cccugccagucccgaga

SEQ ID NO: 4721 - RNA, 17 nt, Homo sapiens
gucccgagacccaccug

SEQ ID NO: 4722 - RNA, 17 nt, Homo sapiens
cgagacccaccuggaca

SEQ ID NO: 4723 - RNA, 17 nt, Homo sapiens
ccaccuggacaugcucc

SEQ ID NO: 4724 - RNA, 17 nt, Homo sapiens
accuggacaugcuccgc

SEQ ID NO: 4725 - RNA, 17 nt, Homo sapiens
cuggacaugcuccgcca

SEQ ID NO: 4726 - RNA, 17 nt, Homo sapiens
caugcuccgccaccucu

SEQ ID NO: 4727 - RNA, 17 nt, Homo sapiens
gcuccgccaccucuacc

SEQ ID NO: 4728 - RNA, 17 nt, Homo sapiens
ccaccucuaccagggcu

SEQ ID NO: 4729 - RNA, 17 nt, Homo sapiens
cuaccagggcugccagg

SEQ ID NO: 4730 - RNA, 17 nt, Homo sapiens
ccagggcugccaggugg

SEQ ID NO: 4731 - RNA, 17 nt, Homo sapiens
gcugccagguggugcag

SEQ ID NO: 4732 - RNA, 17 nt, Homo sapiens
gccagguggugcaggga

SEQ ID NO: 4733 - RNA, 17 nt, Homo sapiens
cagguggugcagggaaa

SEQ ID NO: 4734 - RNA, 17 nt, Homo sapiens
gcagggaaaccuggaac

SEQ ID NO: 4735 - RNA, 17 nt, Homo sapiens
aaccuggaacucaccua

SEQ ID NO: 4736 - RNA, 17 nt, Homo sapiens
uggaacucaccuaccug

SEQ ID NO: 4737 - RNA, 17 nt, Homo sapiens
acucaccuaccugccca

SEQ ID NO: 4738 - RNA, 17 nt, Homo sapiens
accuaccugcccaccaa

SEQ ID NO: 4739 - RNA, 17 nt, Homo sapiens
accugcccaccaaugcc

SEQ ID NO: 4740 - RNA, 17 nt, Homo sapiens
gcccaccaaugccagcc

SEQ ID NO: 4741 - RNA, 17 nt, Homo sapiens
ccaccaaugccagccug

SEQ ID NO: 4742 - RNA, 17 nt, Homo sapiens
caaugccagccuguccu

SEQ ID NO: 4743 - RNA, 17 nt, Homo sapiens
gccagccuguccuuccu

SEQ ID NO: 4744 - RNA, 17 nt, Homo sapiens
uccuuccugcaggauau

SEQ ID NO: 4745 - RNA, 17 nt, Homo sapiens
ccugcaggauauccagg

SEQ ID NO: 4746 - RNA, 17 nt, Homo sapiens
ugcaggauauccaggag

SEQ ID NO: 4747 - RNA, 17 nt, Homo sapiens
uccaggaggugcagggc

SEQ ID NO: 4748 - RNA, 17 nt, Homo sapiens
caggaggugcagggcua

SEQ ID NO: 4749 - RNA, 17 nt, Homo sapiens
ggugcagggcuacgugc

SEQ ID NO: 4750 - RNA, 17 nt, Homo sapiens
gcagggcuacgugcuca

SEQ ID NO: 4751 - RNA, 17 nt, Homo sapiens
agggcuacgugcucauc

SEQ ID NO: 4752 - RNA, 17 nt, Homo sapiens
ggcuacgugcucaucgc

SEQ ID NO: 4753 - RNA, 17 nt, Homo sapiens
acgugcucaucgcucac

SEQ ID NO: 4754 - RNA, 17 nt, Homo sapiens
ugcucaucgcucacaac

SEQ ID NO: 4755 - RNA, 17 nt, Homo sapiens
caucgcucacaaccaag

SEQ ID NO: 4756 - RNA, 17 nt, Homo sapiens
cgcucacaaccaaguga

SEQ ID NO: 4757 - RNA, 17 nt, Homo sapiens
acaaccaagugaggcag

SEQ ID NO: 4758 - RNA, 17 nt, Homo sapiens
caagugaggcagguccc

SEQ ID NO: 4759 - RNA, 17 nt, Homo sapiens
ugaggcaggucccacug

SEQ ID NO: 4760 - RNA, 17 nt, Homo sapiens
caggucccacugcagag

SEQ ID NO: 4761 - RNA, 17 nt, Homo sapiens
gucccacugcagaggcu

SEQ ID NO: 4762 - RNA, 17 nt, Homo sapiens
cugcagaggcugcggau

SEQ ID NO: 4763 - RNA, 17 nt, Homo sapiens
cagaggcugcggauugu

SEQ ID NO: 4764 - RNA, 17 nt, Homo sapiens
ggcugcggauugugcga

SEQ ID NO: 4765 - RNA, 17 nt, Homo sapiens
ugcggauugugcgaggc

SEQ ID NO: 4766 - RNA, 17 nt, Homo sapiens
cggauugugcgaggcac

SEQ ID NO: 4767 - RNA, 17 nt, Homo sapiens
ugugcgaggcacccagc

SEQ ID NO: 4768 - RNA, 17 nt, Homo sapiens
ugcgaggcacccagcuc

SEQ ID NO: 4769 - RNA, 17 nt, Homo sapiens
ggcacccagcucuuuga

SEQ ID NO: 4770 - RNA, 17 nt, Homo sapiens
cuuugaggacaacuaug

SEQ ID NO: 4771 - RNA, 17 nt, Homo sapiens
ugaggacaacuaugccc

SEQ ID NO: 4772 - RNA, 17 nt, Homo sapiens
ggacaacuaugcccugg

SEQ ID NO: 4773 - RNA, 17 nt, Homo sapiens
acaacuaugcccuggcc

SEQ ID NO: 4774 - RNA, 17 nt, Homo sapiens
augcccuggccgugcua

SEQ ID NO: 4775 - RNA, 17 nt, Homo sapiens
cccuggccgugcuagac

SEQ ID NO: 4776 - RNA, 17 nt, Homo sapiens
cuggccgugcuagacaa

SEQ ID NO: 4777 - RNA, 17 nt, Homo sapiens
cgugcuagacaauggag

SEQ ID NO: 4778 - RNA, 17 nt, Homo sapiens
gcuagacaauggagacc

SEQ ID NO: 4779 - RNA, 17 nt, Homo sapiens
caauggagacccgcuga

SEQ ID NO: 4780 - RNA, 17 nt, Homo sapiens
ggagacccgcugaacaa

SEQ ID NO: 4781 - RNA, 17 nt, Homo sapiens
cccgcugaacaauacca

SEQ ID NO: 4782 - RNA, 17 nt, Homo sapiens
gcugaacaauaccaccc

SEQ ID NO: 4783 - RNA, 17 nt, Homo sapiens
ugaacaauaccaccccu

SEQ ID NO: 4784 - RNA, 17 nt, Homo sapiens
acaauaccaccccuguc

SEQ ID NO: 4785 - RNA, 17 nt, Homo sapiens
ccaccccugucacaggg

SEQ ID NO: 4786 - RNA, 17 nt, Homo sapiens
ccccugucacaggggcc

SEQ ID NO: 4787 - RNA, 17 nt, Homo sapiens
ucacaggggccucccca

SEQ ID NO: 4788 - RNA, 17 nt, Homo sapiens
cccaggaggccugcggg

SEQ ID NO: 4789 - RNA, 17 nt, Homo sapiens
ggaggccugcgggagcu

SEQ ID NO: 4790 - RNA, 17 nt, Homo sapiens
cugcgggagcugcagcu

SEQ ID NO: 4791 - RNA, 17 nt, Homo sapiens
cgggagcugcagcuucg

SEQ ID NO: 4792 - RNA, 17 nt, Homo sapiens
gagcugcagcuucgaag

SEQ ID NO: 4793 - RNA, 17 nt, Homo sapiens
gcuucgaagccucacag

SEQ ID NO: 4794 - RNA, 17 nt, Homo sapiens
gaagccucacagagauc

SEQ ID NO: 4795 - RNA, 17 nt, Homo sapiens
ucacagagaucuugaaa

SEQ ID NO: 4796 - RNA, 17 nt, Homo sapiens
aaggaggggucuugauc

SEQ ID NO: 4797 - RNA, 17 nt, Homo sapiens
gggucuugauccagcgg

SEQ ID NO: 4798 - RNA, 17 nt, Homo sapiens
uugauccagcggaaccc

SEQ ID NO: 4799 - RNA, 17 nt, Homo sapiens
ccagcggaacccccagc

SEQ ID NO: 4800 - RNA, 17 nt, Homo sapiens
aacccccagcucugcua

SEQ ID NO: 4801 - RNA, 17 nt, Homo sapiens
ccagcucugcuaccagg

SEQ ID NO: 4802 - RNA, 17 nt, Homo sapiens
gcucugcuaccaggaca

SEQ ID NO: 4803 - RNA, 17 nt, Homo sapiens
cuaccaggacacgauuu

SEQ ID NO: 4804 - RNA, 17 nt, Homo sapiens
accaggacacgauuuug

SEQ ID NO: 4805 - RNA, 17 nt, Homo sapiens
aggacacgauuuugugg

SEQ ID NO: 4806 - RNA, 17 nt, Homo sapiens
acgauuuuguggaagga

SEQ ID NO: 4807 - RNA, 17 nt, Homo sapiens
guggaaggacaucuucc

SEQ ID NO: 4808 - RNA, 17 nt, Homo sapiens
ggaaggacaucuuccac

SEQ ID NO: 4809 - RNA, 17 nt, Homo sapiens
caucuuccacaagaaca

SEQ ID NO: 4810 - RNA, 17 nt, Homo sapiens
ccacaagaacaaccagc

SEQ ID NO: 4811 - RNA, 17 nt, Homo sapiens
caagaacaaccagcugg

SEQ ID NO: 4812 - RNA, 17 nt, Homo sapiens
aacaaccagcuggcucu

SEQ ID NO: 4813 - RNA, 17 nt, Homo sapiens
accagcuggcucucaca

SEQ ID NO: 4814 - RNA, 17 nt, Homo sapiens
uggcucucacacugaua

SEQ ID NO: 4815 - RNA, 17 nt, Homo sapiens
gcucucacacugauaga

SEQ ID NO: 4816 - RNA, 17 nt, Homo sapiens
ucacacugauagacacc

SEQ ID NO: 4817 - RNA, 17 nt, Homo sapiens
acugauagacaccaacc

SEQ ID NO: 4818 - RNA, 17 nt, Homo sapiens
ugauagacaccaaccgc

SEQ ID NO: 4819 - RNA, 17 nt, Homo sapiens
agacaccaaccgcucuc

SEQ ID NO: 4820 - RNA, 17 nt, Homo sapiens
caccaaccgcucucggg

SEQ ID NO: 4821 - RNA, 17 nt, Homo sapiens
gcucucgggccugccac

SEQ ID NO: 4822 - RNA, 17 nt, Homo sapiens
ucgggccugccaccccu

SEQ ID NO: 4823 - RNA, 17 nt, Homo sapiens
ggccugccaccccuguu

SEQ ID NO: 4824 - RNA, 17 nt, Homo sapiens
ccaccccuguucuccga

SEQ ID NO: 4825 - RNA, 17 nt, Homo sapiens
guucuccgauguguaag

SEQ ID NO: 4826 - RNA, 17 nt, Homo sapiens
ucuccgauguguaaggg

SEQ ID NO: 4827 - RNA, 17 nt, Homo sapiens
uccgauguguaagggcu

SEQ ID NO: 4828 - RNA, 17 nt, Homo sapiens
guguaagggcucccgcu

SEQ ID NO: 4829 - RNA, 17 nt, Homo sapiens
gggcucccgcugcuggg

SEQ ID NO: 4830 - RNA, 17 nt, Homo sapiens
cucccgcugcuggggag

SEQ ID NO: 4831 - RNA, 17 nt, Homo sapiens
gggagagaguucugagg

SEQ ID NO: 4832 - RNA, 17 nt, Homo sapiens
uucugaggauugucaga

SEQ ID NO: 4833 - RNA, 17 nt, Homo sapiens
ugaggauugucagagcc

SEQ ID NO: 4834 - RNA, 17 nt, Homo sapiens
uugucagagccugacgc

SEQ ID NO: 4835 - RNA, 17 nt, Homo sapiens
agagccugacgcgcacu

SEQ ID NO: 4836 - RNA, 17 nt, Homo sapiens
agccugacgcgcacugu

SEQ ID NO: 4837 - RNA, 17 nt, Homo sapiens
ccugacgcgcacugucu

SEQ ID NO: 4838 - RNA, 17 nt, Homo sapiens
ugacgcgcacugucugu

SEQ ID NO: 4839 - RNA, 17 nt, Homo sapiens
cgcgcacugucugugcc

SEQ ID NO: 4840 - RNA, 17 nt, Homo sapiens
cacugucugugccggug

SEQ ID NO: 4841 - RNA, 17 nt, Homo sapiens
cugucugugccgguggc

SEQ ID NO: 4842 - RNA, 17 nt, Homo sapiens
cugugccgguggcugug

SEQ ID NO: 4843 - RNA, 17 nt, Homo sapiens
ugccgguggcugugccc

SEQ ID NO: 4844 - RNA, 17 nt, Homo sapiens
cgguggcugugcccgcu

SEQ ID NO: 4845 - RNA, 17 nt, Homo sapiens
guggcugugcccgcugc

SEQ ID NO: 4846 - RNA, 17 nt, Homo sapiens
cugugcccgcugcaagg

SEQ ID NO: 4847 - RNA, 17 nt, Homo sapiens
ugcccgcugcaaggggc

SEQ ID NO: 4848 - RNA, 17 nt, Homo sapiens
ugcaaggggccacugcc

SEQ ID NO: 4849 - RNA, 17 nt, Homo sapiens
aaggggccacugcccac

SEQ ID NO: 4850 - RNA, 17 nt, Homo sapiens
gggccacugcccacuga

SEQ ID NO: 4851 - RNA, 17 nt, Homo sapiens
cacugcccacugacugc

SEQ ID NO: 4852 - RNA, 17 nt, Homo sapiens
gcccacugacugcugcc

SEQ ID NO: 4853 - RNA, 17 nt, Homo sapiens
cacugacugcugccaug

SEQ ID NO: 4854 - RNA, 17 nt, Homo sapiens
ugacugcugccaugagc

SEQ ID NO: 4855 - RNA, 17 nt, Homo sapiens
cugcugccaugagcagu

SEQ ID NO: 4856 - RNA, 17 nt, Homo sapiens
ugccaugagcagugugc

SEQ ID NO: 4857 - RNA, 17 nt, Homo sapiens
caugagcagugugcugc

SEQ ID NO: 4858 - RNA, 17 nt, Homo sapiens
ugagcagugugcugccg

SEQ ID NO: 4859 - RNA, 17 nt, Homo sapiens
agcagugugcugccggc

SEQ ID NO: 4860 - RNA, 17 nt, Homo sapiens
agugugcugccggcugc

SEQ ID NO: 4861 - RNA, 17 nt, Homo sapiens
ugcugccggcugcacgg

SEQ ID NO: 4862 - RNA, 17 nt, Homo sapiens
ugccggcugcacgggcc

SEQ ID NO: 4863 - RNA, 17 nt, Homo sapiens
ccggcugcacgggcccc

SEQ ID NO: 4864 - RNA, 17 nt, Homo sapiens
cugcacgggccccaagc

SEQ ID NO: 4865 - RNA, 17 nt, Homo sapiens
ggccccaagcacucuga

SEQ ID NO: 4866 - RNA, 17 nt, Homo sapiens
ccccaagcacucugacu

SEQ ID NO: 4867 - RNA, 17 nt, Homo sapiens
gcacucugacugccugg

SEQ ID NO: 4868 - RNA, 17 nt, Homo sapiens
cucugacugccuggccu

SEQ ID NO: 4869 - RNA, 17 nt, Homo sapiens
acugccuggccugccuc

SEQ ID NO: 4870 - RNA, 17 nt, Homo sapiens
ccuggccugccuccacu

SEQ ID NO: 4871 - RNA, 17 nt, Homo sapiens
cugccuccacuucaacc

SEQ ID NO: 4872 - RNA, 17 nt, Homo sapiens
ccacuucaaccacagug

SEQ ID NO: 4873 - RNA, 17 nt, Homo sapiens
cuucaaccacaguggca

SEQ ID NO: 4874 - RNA, 17 nt, Homo sapiens
caaccacaguggcaucu

SEQ ID NO: 4875 - RNA, 17 nt, Homo sapiens
ccacaguggcaucugug

SEQ ID NO: 4876 - RNA, 17 nt, Homo sapiens
acaguggcaucugugag

SEQ ID NO: 4877 - RNA, 17 nt, Homo sapiens
uggcaucugugagcugc

SEQ ID NO: 4878 - RNA, 17 nt, Homo sapiens
aucugugagcugcacug

SEQ ID NO: 4879 - RNA, 17 nt, Homo sapiens
ugugagcugcacugccc

SEQ ID NO: 4880 - RNA, 17 nt, Homo sapiens
ugagcugcacugcccag

SEQ ID NO: 4881 - RNA, 17 nt, Homo sapiens
gcugcacugcccagccc

SEQ ID NO: 4882 - RNA, 17 nt, Homo sapiens
acugcccagcccugguc

SEQ ID NO: 4883 - RNA, 17 nt, Homo sapiens
cagcccuggucaccuac

SEQ ID NO: 4884 - RNA, 17 nt, Homo sapiens
cccuggucaccuacaac

SEQ ID NO: 4885 - RNA, 17 nt, Homo sapiens
ggucaccuacaacacag

SEQ ID NO: 4886 - RNA, 17 nt, Homo sapiens
caccuacaacacagaca

SEQ ID NO: 4887 - RNA, 17 nt, Homo sapiens
ccuacaacacagacacg

SEQ ID NO: 4888 - RNA, 17 nt, Homo sapiens
caacacagacacguuug

SEQ ID NO: 4889 - RNA, 17 nt, Homo sapiens
acacagacacguuugag

SEQ ID NO: 4890 - RNA, 17 nt, Homo sapiens
acagacacguuugaguc

SEQ ID NO: 4891 - RNA, 17 nt, Homo sapiens
acguuugaguccaugcc

SEQ ID NO: 4892 - RNA, 17 nt, Homo sapiens
uugaguccaugcccaau

SEQ ID NO: 4893 - RNA, 17 nt, Homo sapiens
gaguccaugcccaaucc

SEQ ID NO: 4894 - RNA, 17 nt, Homo sapiens
caugcccaaucccgagg

SEQ ID NO: 4895 - RNA, 17 nt, Homo sapiens
ucccgagggccgguaua

SEQ ID NO: 4896 - RNA, 17 nt, Homo sapiens
gagggccgguauacauu

SEQ ID NO: 4897 - RNA, 17 nt, Homo sapiens
gggccgguauacauucg

SEQ ID NO: 4898 - RNA, 17 nt, Homo sapiens
gccgguauacauucggc

SEQ ID NO: 4899 - RNA, 17 nt, Homo sapiens
cgguauacauucggcgc

SEQ ID NO: 4900 - RNA, 17 nt, Homo sapiens
uacauucggcgccagcu

SEQ ID NO: 4901 - RNA, 17 nt, Homo sapiens
cauucggcgccagcugu

SEQ ID NO: 4902 - RNA, 17 nt, Homo sapiens
cggcgccagcuguguga

SEQ ID NO: 4903 - RNA, 17 nt, Homo sapiens
cgccagcugugugacug

SEQ ID NO: 4904 - RNA, 17 nt, Homo sapiens
ccagcugugugacugcc

SEQ ID NO: 4905 - RNA, 17 nt, Homo sapiens
gcugugugacugccugu

SEQ ID NO: 4906 - RNA, 17 nt, Homo sapiens
gugugacugccuguccc

SEQ ID NO: 4907 - RNA, 17 nt, Homo sapiens
gacugccugucccuaca

SEQ ID NO: 4908 - RNA, 17 nt, Homo sapiens
cugucccuacaacuacc

SEQ ID NO: 4909 - RNA, 17 nt, Homo sapiens
ucccuacaacuaccuuu

SEQ ID NO: 4910 - RNA, 17 nt, Homo sapiens
cuacaacuaccuuucua

SEQ ID NO: 4911 - RNA, 17 nt, Homo sapiens
accuuucuacggacgug

SEQ ID NO: 4912 - RNA, 17 nt, Homo sapiens
uucuacggacgugggau

SEQ ID NO: 4913 - RNA, 17 nt, Homo sapiens
cuacggacgugggaucc

SEQ ID NO: 4914 - RNA, 17 nt, Homo sapiens
gacgugggauccugcac

SEQ ID NO: 4915 - RNA, 17 nt, Homo sapiens
gggauccugcacccucg

SEQ ID NO: 4916 - RNA, 17 nt, Homo sapiens
gauccugcacccucguc

SEQ ID NO: 4917 - RNA, 17 nt, Homo sapiens
gcacccucgucugcccc

SEQ ID NO: 4918 - RNA, 17 nt, Homo sapiens
ccucgucugcccccugc

SEQ ID NO: 4919 - RNA, 17 nt, Homo sapiens
ugcccccugcacaacca

SEQ ID NO: 4920 - RNA, 17 nt, Homo sapiens
cccccugcacaaccaag

SEQ ID NO: 4921 - RNA, 17 nt, Homo sapiens
ccugcacaaccaagagg

SEQ ID NO: 4922 - RNA, 17 nt, Homo sapiens
accaagaggugacagca

SEQ ID NO: 4923 - RNA, 17 nt, Homo sapiens
aagaggugacagcagag

SEQ ID NO: 4924 - RNA, 17 nt, Homo sapiens
aggugacagcagaggau

SEQ ID NO: 4925 - RNA, 17 nt, Homo sapiens
agcagaggauggaacac

SEQ ID NO: 4926 - RNA, 17 nt, Homo sapiens
aggauggaacacagcgg

SEQ ID NO: 4927 - RNA, 17 nt, Homo sapiens
gauggaacacagcggug

SEQ ID NO: 4928 - RNA, 17 nt, Homo sapiens
ggaacacagcgguguga

SEQ ID NO: 4929 - RNA, 17 nt, Homo sapiens
acacagcggugugagaa

SEQ ID NO: 4930 - RNA, 17 nt, Homo sapiens
acagcggugugagaagu

SEQ ID NO: 4931 - RNA, 17 nt, Homo sapiens
ugugagaagugcagcaa

SEQ ID NO: 4932 - RNA, 17 nt, Homo sapiens
ugagaagugcagcaagc

SEQ ID NO: 4933 - RNA, 17 nt, Homo sapiens
gaagugcagcaagcccu

SEQ ID NO: 4934 - RNA, 17 nt, Homo sapiens
ugcagcaagcccugugc

SEQ ID NO: 4935 - RNA, 17 nt, Homo sapiens
caagcccugugcccgag

SEQ ID NO: 4936 - RNA, 17 nt, Homo sapiens
agcccugugcccgagug

SEQ ID NO: 4937 - RNA, 17 nt, Homo sapiens
gugcccgagugugcuau

SEQ ID NO: 4938 - RNA, 17 nt, Homo sapiens
gcccgagugugcuaugg

SEQ ID NO: 4939 - RNA, 17 nt, Homo sapiens
ccgagugugcuaugguc

SEQ ID NO: 4940 - RNA, 17 nt, Homo sapiens
agugugcuauggucugg

SEQ ID NO: 4941 - RNA, 17 nt, Homo sapiens
gugcuauggucugggca

SEQ ID NO: 4942 - RNA, 17 nt, Homo sapiens
uggucugggcauggagc

SEQ ID NO: 4943 - RNA, 17 nt, Homo sapiens
gucugggcauggagcac

SEQ ID NO: 4944 - RNA, 17 nt, Homo sapiens
ggcauggagcacuugcg

SEQ ID NO: 4945 - RNA, 17 nt, Homo sapiens
cauggagcacuugcgag

SEQ ID NO: 4946 - RNA, 17 nt, Homo sapiens
gagcacuugcgagaggu

SEQ ID NO: 4947 - RNA, 17 nt, Homo sapiens
ugcgagaggugagggca

SEQ ID NO: 4948 - RNA, 17 nt, Homo sapiens
aggugagggcaguuacc

SEQ ID NO: 4949 - RNA, 17 nt, Homo sapiens
ugagggcaguuaccagu

SEQ ID NO: 4950 - RNA, 17 nt, Homo sapiens
gggcaguuaccagugcc

SEQ ID NO: 4951 - RNA, 17 nt, Homo sapiens
aguuaccagugccaaua

SEQ ID NO: 4952 - RNA, 17 nt, Homo sapiens
uuaccagugccaauauc

SEQ ID NO: 4953 - RNA, 17 nt, Homo sapiens
cagugccaauauccagg

SEQ ID NO: 4954 - RNA, 17 nt, Homo sapiens
gugccaauauccaggag

SEQ ID NO: 4955 - RNA, 17 nt, Homo sapiens
auccaggaguuugcugg

SEQ ID NO: 4956 - RNA, 17 nt, Homo sapiens
aggaguuugcuggcugc

SEQ ID NO: 4957 - RNA, 17 nt, Homo sapiens
guuugcuggcugcaaga

SEQ ID NO: 4958 - RNA, 17 nt, Homo sapiens
ugcuggcugcaagaaga

SEQ ID NO: 4959 - RNA, 17 nt, Homo sapiens
gcaagaagaucuuuggg

SEQ ID NO: 4960 - RNA, 17 nt, Homo sapiens
cuuugggagccuggcau

SEQ ID NO: 4961 - RNA, 17 nt, Homo sapiens
ggagccuggcauuucug

SEQ ID NO: 4962 - RNA, 17 nt, Homo sapiens
agccuggcauuucugcc

SEQ ID NO: 4963 - RNA, 17 nt, Homo sapiens
gcauuucugccggagag

SEQ ID NO: 4964 - RNA, 17 nt, Homo sapiens
gccggagagcuuugaug

SEQ ID NO: 4965 - RNA, 17 nt, Homo sapiens
gagcuuugauggggacc

SEQ ID NO: 4966 - RNA, 17 nt, Homo sapiens
ugauggggacccagccu

SEQ ID NO: 4967 - RNA, 17 nt, Homo sapiens
gggacccagccuccaac

SEQ ID NO: 4968 - RNA, 17 nt, Homo sapiens
agccuccaacacugccc

SEQ ID NO: 4969 - RNA, 17 nt, Homo sapiens
ccuccaacacugccccg

SEQ ID NO: 4970 - RNA, 17 nt, Homo sapiens
ccaacacugccccgcuc

SEQ ID NO: 4971 - RNA, 17 nt, Homo sapiens
acugccccgcuccagcc

SEQ ID NO: 4972 - RNA, 17 nt, Homo sapiens
ccgcuccagccagagca

SEQ ID NO: 4973 - RNA, 17 nt, Homo sapiens
cagccagagcagcucca

SEQ ID NO: 4974 - RNA, 17 nt, Homo sapiens
ccagagcagcuccaagu

SEQ ID NO: 4975 - RNA, 17 nt, Homo sapiens
agcuccaaguguuugag

SEQ ID NO: 4976 - RNA, 17 nt, Homo sapiens
cuccaaguguuugagac

SEQ ID NO: 4977 - RNA, 17 nt, Homo sapiens
uguuugagacucuggaa

SEQ ID NO: 4978 - RNA, 17 nt, Homo sapiens
uggaagagaucacaggu

SEQ ID NO: 4979 - RNA, 17 nt, Homo sapiens
aagagaucacagguuac

SEQ ID NO: 4980 - RNA, 17 nt, Homo sapiens
gaucacagguuaccuau

SEQ ID NO: 4981 - RNA, 17 nt, Homo sapiens
cacagguuaccuauaca

SEQ ID NO: 4982 - RNA, 17 nt, Homo sapiens
gguuaccuauacaucuc

SEQ ID NO: 4983 - RNA, 17 nt, Homo sapiens
uuaccuauacaucucag

SEQ ID NO: 4984 - RNA, 17 nt, Homo sapiens
accuauacaucucagca

SEQ ID NO: 4985 - RNA, 17 nt, Homo sapiens
acaucucagcauggccg

SEQ ID NO: 4986 - RNA, 17 nt, Homo sapiens
aucucagcauggccgga

SEQ ID NO: 4987 - RNA, 17 nt, Homo sapiens
ucagcauggccggacag

SEQ ID NO: 4988 - RNA, 17 nt, Homo sapiens
auggccggacagccugc

SEQ ID NO: 4989 - RNA, 17 nt, Homo sapiens
gccggacagccugccug

SEQ ID NO: 4990 - RNA, 17 nt, Homo sapiens
gacagccugccugaccu

SEQ ID NO: 4991 - RNA, 17 nt, Homo sapiens
ccugccugaccucagcg

SEQ ID NO: 4992 - RNA, 17 nt, Homo sapiens
ugaccucagcgucuucc

SEQ ID NO: 4993 - RNA, 17 nt, Homo sapiens
accucagcgucuuccag

SEQ ID NO: 4994 - RNA, 17 nt, Homo sapiens
cuuccagaaccugcaag

SEQ ID NO: 4995 - RNA, 17 nt, Homo sapiens
cagaaccugcaaguaau

SEQ ID NO: 4996 - RNA, 17 nt, Homo sapiens
accugcaaguaauccgg

SEQ ID NO: 4997 - RNA, 17 nt, Homo sapiens
ugcaaguaauccgggga

SEQ ID NO: 4998 - RNA, 17 nt, Homo sapiens
auccggggacgaauucu

SEQ ID NO: 4999 - RNA, 17 nt, Homo sapiens
ggggacgaauucugcac

SEQ ID NO: 5000 - RNA, 17 nt, Homo sapiens
cgaauucugcacaaugg

SEQ ID NO: 5001 - RNA, 17 nt, Homo sapiens
aauucugcacaauggcg

SEQ ID NO: 5002 - RNA, 17 nt, Homo sapiens
ucugcacaauggcgccu

SEQ ID NO: 5003 - RNA, 17 nt, Homo sapiens
gcacaauggcgccuacu

SEQ ID NO: 5004 - RNA, 17 nt, Homo sapiens
acaauggcgccuacucg

SEQ ID NO: 5005 - RNA, 17 nt, Homo sapiens
uggcgccuacucgcuga

SEQ ID NO: 5006 - RNA, 17 nt, Homo sapiens
gccuacucgcugacccu

SEQ ID NO: 5007 - RNA, 17 nt, Homo sapiens
acucgcugacccugcaa

SEQ ID NO: 5008 - RNA, 17 nt, Homo sapiens
cugacccugcaagggcu

SEQ ID NO: 5009 - RNA, 17 nt, Homo sapiens
cugcaagggcugggcau

SEQ ID NO: 5010 - RNA, 17 nt, Homo sapiens
agggcugggcaucagcu

SEQ ID NO: 5011 - RNA, 17 nt, Homo sapiens
ggcugggcaucagcugg

SEQ ID NO: 5012 - RNA, 17 nt, Homo sapiens
gggcaucagcuggcugg

SEQ ID NO: 5013 - RNA, 17 nt, Homo sapiens
aucagcuggcuggggcu

SEQ ID NO: 5014 - RNA, 17 nt, Homo sapiens
uggcuggggcugcgcuc

SEQ ID NO: 5015 - RNA, 17 nt, Homo sapiens
cuggggcugcgcucacu

SEQ ID NO: 5016 - RNA, 17 nt, Homo sapiens
ggggcugcgcucacuga

SEQ ID NO: 5017 - RNA, 17 nt, Homo sapiens
cugcgcucacugaggga

SEQ ID NO: 5018 - RNA, 17 nt, Homo sapiens
cugagggaacugggcag

SEQ ID NO: 5019 - RNA, 17 nt, Homo sapiens
ggaacugggcaguggac

SEQ ID NO: 5020 - RNA, 17 nt, Homo sapiens
acugggcaguggacugg

SEQ ID NO: 5021 - RNA, 17 nt, Homo sapiens
ggcaguggacuggcccu

SEQ ID NO: 5022 - RNA, 17 nt, Homo sapiens
guggacuggcccucauc

SEQ ID NO: 5023 - RNA, 17 nt, Homo sapiens
uggcccucauccaccau

SEQ ID NO: 5024 - RNA, 17 nt, Homo sapiens
ccucauccaccauaaca

SEQ ID NO: 5025 - RNA, 17 nt, Homo sapiens
cauccaccauaacaccc

SEQ ID NO: 5026 - RNA, 17 nt, Homo sapiens
ccaccauaacacccacc

SEQ ID NO: 5027 - RNA, 17 nt, Homo sapiens
accauaacacccaccuc

SEQ ID NO: 5028 - RNA, 17 nt, Homo sapiens
uaacacccaccucugcu

SEQ ID NO: 5029 - RNA, 17 nt, Homo sapiens
ccaccucugcuucgugc

SEQ ID NO: 5030 - RNA, 17 nt, Homo sapiens
ucugcuucgugcacacg

SEQ ID NO: 5031 - RNA, 17 nt, Homo sapiens
ugcuucgugcacacggu

SEQ ID NO: 5032 - RNA, 17 nt, Homo sapiens
cuucgugcacacggugc

SEQ ID NO: 5033 - RNA, 17 nt, Homo sapiens
ucgugcacacggugccc

SEQ ID NO: 5034 - RNA, 17 nt, Homo sapiens
ugcacacggugcccugg

SEQ ID NO: 5035 - RNA, 17 nt, Homo sapiens
cacacggugcccuggga

SEQ ID NO: 5036 - RNA, 17 nt, Homo sapiens
gcccugggaccagcucu

SEQ ID NO: 5037 - RNA, 17 nt, Homo sapiens
ugggaccagcucuuucg

SEQ ID NO: 5038 - RNA, 17 nt, Homo sapiens
cuuucggaacccgcacc

SEQ ID NO: 5039 - RNA, 17 nt, Homo sapiens
cggaacccgcaccaagc

SEQ ID NO: 5040 - RNA, 17 nt, Homo sapiens
gaacccgcaccaagcuc

SEQ ID NO: 5041 - RNA, 17 nt, Homo sapiens
cgcaccaagcucugcuc

SEQ ID NO: 5042 - RNA, 17 nt, Homo sapiens
caagcucugcuccacac

SEQ ID NO: 5043 - RNA, 17 nt, Homo sapiens
ucugcuccacacugcca

SEQ ID NO: 5044 - RNA, 17 nt, Homo sapiens
ugcuccacacugccaac

SEQ ID NO: 5045 - RNA, 17 nt, Homo sapiens
uccacacugccaaccgg

SEQ ID NO: 5046 - RNA, 17 nt, Homo sapiens
cacugccaaccggccag

SEQ ID NO: 5047 - RNA, 17 nt, Homo sapiens
gccaaccggccagagga

SEQ ID NO: 5048 - RNA, 17 nt, Homo sapiens
gccagaggacgagugug

SEQ ID NO: 5049 - RNA, 17 nt, Homo sapiens
gaggacgaguguguggg

SEQ ID NO: 5050 - RNA, 17 nt, Homo sapiens
ggacgagugugugggcg

SEQ ID NO: 5051 - RNA, 17 nt, Homo sapiens
acgagugugugggcgag

SEQ ID NO: 5052 - RNA, 17 nt, Homo sapiens
gugugugggcgagggcc

SEQ ID NO: 5053 - RNA, 17 nt, Homo sapiens
gggcgagggccuggccu

SEQ ID NO: 5054 - RNA, 17 nt, Homo sapiens
agggccuggccugccac

SEQ ID NO: 5055 - RNA, 17 nt, Homo sapiens
ccuggccugccaccagc

SEQ ID NO: 5056 - RNA, 17 nt, Homo sapiens
ggccugccaccagcugu

SEQ ID NO: 5057 - RNA, 17 nt, Homo sapiens
ugccaccagcugugcgc

SEQ ID NO: 5058 - RNA, 17 nt, Homo sapiens
caccagcugugcgcccg

SEQ ID NO: 5059 - RNA, 17 nt, Homo sapiens
ccagcugugcgcccgag

SEQ ID NO: 5060 - RNA, 17 nt, Homo sapiens
agcugugcgcccgaggg

SEQ ID NO: 5061 - RNA, 17 nt, Homo sapiens
gcccgagggcacugcug

SEQ ID NO: 5062 - RNA, 17 nt, Homo sapiens
ccgagggcacugcuggg

SEQ ID NO: 5063 - RNA, 17 nt, Homo sapiens
agggcacugcugggguc

SEQ ID NO: 5064 - RNA, 17 nt, Homo sapiens
cugcugggguccagggc

SEQ ID NO: 5065 - RNA, 17 nt, Homo sapiens
gguccagggcccaccca

SEQ ID NO: 5066 - RNA, 17 nt, Homo sapiens
cagggcccacccagugu

SEQ ID NO: 5067 - RNA, 17 nt, Homo sapiens
cccacccagugugucaa

SEQ ID NO: 5068 - RNA, 17 nt, Homo sapiens
cacccagugugucaacu

SEQ ID NO: 5069 - RNA, 17 nt, Homo sapiens
cccagugugucaacugc

SEQ ID NO: 5070 - RNA, 17 nt, Homo sapiens
gugugucaacugcagcc

SEQ ID NO: 5071 - RNA, 17 nt, Homo sapiens
ugucaacugcagccagu

SEQ ID NO: 5072 - RNA, 17 nt, Homo sapiens
caacugcagccaguucc

SEQ ID NO: 5073 - RNA, 17 nt, Homo sapiens
ugcagccaguuccuucg

SEQ ID NO: 5074 - RNA, 17 nt, Homo sapiens
ccuucggggccaggagu

SEQ ID NO: 5075 - RNA, 17 nt, Homo sapiens
ggccaggagugcgugga

SEQ ID NO: 5076 - RNA, 17 nt, Homo sapiens
ccaggagugcguggagg

SEQ ID NO: 5077 - RNA, 17 nt, Homo sapiens
aggagugcguggaggaa

SEQ ID NO: 5078 - RNA, 17 nt, Homo sapiens
guggaggaaugccgagu

SEQ ID NO: 5079 - RNA, 17 nt, Homo sapiens
ggaggaaugccgaguac

SEQ ID NO: 5080 - RNA, 17 nt, Homo sapiens
aaugccgaguacugcag

SEQ ID NO: 5081 - RNA, 17 nt, Homo sapiens
ugccgaguacugcaggg

SEQ ID NO: 5082 - RNA, 17 nt, Homo sapiens
cgaguacugcaggggcu

SEQ ID NO: 5083 - RNA, 17 nt, Homo sapiens
cugcaggggcuccccag

SEQ ID NO: 5084 - RNA, 17 nt, Homo sapiens
cccagggaguaugugaa

SEQ ID NO: 5085 - RNA, 17 nt, Homo sapiens
cagggaguaugugaaug

SEQ ID NO: 5086 - RNA, 17 nt, Homo sapiens
gggaguaugugaaugcc

SEQ ID NO: 5087 - RNA, 17 nt, Homo sapiens
guaugugaaugccaggc

SEQ ID NO: 5088 - RNA, 17 nt, Homo sapiens
augugaaugccaggcac

SEQ ID NO: 5089 - RNA, 17 nt, Homo sapiens
aaugccaggcacuguuu

SEQ ID NO: 5090 - RNA, 17 nt, Homo sapiens
ugccaggcacuguuugc

SEQ ID NO: 5091 - RNA, 17 nt, Homo sapiens
caggcacuguuugccgu

SEQ ID NO: 5092 - RNA, 17 nt, Homo sapiens
cacuguuugccgugcca

SEQ ID NO: 5093 - RNA, 17 nt, Homo sapiens
uguuugccgugccaccc

SEQ ID NO: 5094 - RNA, 17 nt, Homo sapiens
uuugccgugccacccug

SEQ ID NO: 5095 - RNA, 17 nt, Homo sapiens
gccgugccacccugagu

SEQ ID NO: 5096 - RNA, 17 nt, Homo sapiens
cacccugagugucagcc

SEQ ID NO: 5097 - RNA, 17 nt, Homo sapiens
cccugagugucagcccc

SEQ ID NO: 5098 - RNA, 17 nt, Homo sapiens
gagugucagccccagaa

SEQ ID NO: 5099 - RNA, 17 nt, Homo sapiens
gccccagaauggcucag

SEQ ID NO: 5100 - RNA, 17 nt, Homo sapiens
ccagaauggcucaguga

SEQ ID NO: 5101 - RNA, 17 nt, Homo sapiens
auggcucagugaccugu

SEQ ID NO: 5102 - RNA, 17 nt, Homo sapiens
gcucagugaccuguuuu

SEQ ID NO: 5103 - RNA, 17 nt, Homo sapiens
agugaccuguuuuggac

SEQ ID NO: 5104 - RNA, 17 nt, Homo sapiens
uguuuuggaccggaggc

SEQ ID NO: 5105 - RNA, 17 nt, Homo sapiens
gaccggaggcugaccag

SEQ ID NO: 5106 - RNA, 17 nt, Homo sapiens
ggaggcugaccagugug

SEQ ID NO: 5107 - RNA, 17 nt, Homo sapiens
gcugaccaguguguggc

SEQ ID NO: 5108 - RNA, 17 nt, Homo sapiens
ugaccaguguguggccu

SEQ ID NO: 5109 - RNA, 17 nt, Homo sapiens
accaguguguggccugu

SEQ ID NO: 5110 - RNA, 17 nt, Homo sapiens
aguguguggccugugcc

SEQ ID NO: 5111 - RNA, 17 nt, Homo sapiens
uguggccugugcccacu

SEQ ID NO: 5112 - RNA, 17 nt, Homo sapiens
uggccugugcccacuau

SEQ ID NO: 5113 - RNA, 17 nt, Homo sapiens
cugugcccacuauaagg

SEQ ID NO: 5114 - RNA, 17 nt, Homo sapiens
ugcccacuauaaggacc

SEQ ID NO: 5115 - RNA, 17 nt, Homo sapiens
cuauaaggacccucccu

SEQ ID NO: 5116 - RNA, 17 nt, Homo sapiens
ucccuucugcguggccc

SEQ ID NO: 5117 - RNA, 17 nt, Homo sapiens
ccuucugcguggcccgc

SEQ ID NO: 5118 - RNA, 17 nt, Homo sapiens
ucugcguggcccgcugc

SEQ ID NO: 5119 - RNA, 17 nt, Homo sapiens
cguggcccgcugcccca

SEQ ID NO: 5120 - RNA, 17 nt, Homo sapiens
ggcccgcugccccagcg

SEQ ID NO: 5121 - RNA, 17 nt, Homo sapiens
cugccccagcgguguga

SEQ ID NO: 5122 - RNA, 17 nt, Homo sapiens
ccccagcggugugaaac

SEQ ID NO: 5123 - RNA, 17 nt, Homo sapiens
ccagcggugugaaaccu

SEQ ID NO: 5124 - RNA, 17 nt, Homo sapiens
ggugugaaaccugaccu

SEQ ID NO: 5125 - RNA, 17 nt, Homo sapiens
gaaaccugaccucuccu

SEQ ID NO: 5126 - RNA, 17 nt, Homo sapiens
ccucuccuacaugccca

SEQ ID NO: 5127 - RNA, 17 nt, Homo sapiens
ucuccuacaugcccauc

SEQ ID NO: 5128 - RNA, 17 nt, Homo sapiens
uccuacaugcccaucug

SEQ ID NO: 5129 - RNA, 17 nt, Homo sapiens
acaugcccaucuggaag

SEQ ID NO: 5130 - RNA, 17 nt, Homo sapiens
aucuggaaguuuccaga

SEQ ID NO: 5131 - RNA, 17 nt, Homo sapiens
guuuccagaugaggagg

SEQ ID NO: 5132 - RNA, 17 nt, Homo sapiens
ugaggagggcgcaugcc

SEQ ID NO: 5133 - RNA, 17 nt, Homo sapiens
aggagggcgcaugccag

SEQ ID NO: 5134 - RNA, 17 nt, Homo sapiens
gagggcgcaugccagcc

SEQ ID NO: 5135 - RNA, 17 nt, Homo sapiens
gggcgcaugccagccuu

SEQ ID NO: 5136 - RNA, 17 nt, Homo sapiens
gcaugccagccuugccc

SEQ ID NO: 5137 - RNA, 17 nt, Homo sapiens
ccagccuugccccauca

SEQ ID NO: 5138 - RNA, 17 nt, Homo sapiens
cuugccccaucaacugc

SEQ ID NO: 5139 - RNA, 17 nt, Homo sapiens
ccccaucaacugcaccc

SEQ ID NO: 5140 - RNA, 17 nt, Homo sapiens
caucaacugcacccacu

SEQ ID NO: 5141 - RNA, 17 nt, Homo sapiens
ucaacugcacccacucc

SEQ ID NO: 5142 - RNA, 17 nt, Homo sapiens
cugcacccacuccugug

SEQ ID NO: 5143 - RNA, 17 nt, Homo sapiens
ccacuccuguguggacc

SEQ ID NO: 5144 - RNA, 17 nt, Homo sapiens
acuccuguguggaccug

SEQ ID NO: 5145 - RNA, 17 nt, Homo sapiens
cuguguggaccuggaug

SEQ ID NO: 5146 - RNA, 17 nt, Homo sapiens
ggaccuggaugacaagg

SEQ ID NO: 5147 - RNA, 17 nt, Homo sapiens
ccuggaugacaagggcu

SEQ ID NO: 5148 - RNA, 17 nt, Homo sapiens
ugacaagggcugccccg

SEQ ID NO: 5149 - RNA, 17 nt, Homo sapiens
caagggcugccccgccg

SEQ ID NO: 5150 - RNA, 17 nt, Homo sapiens
gcugccccgccgagcag

SEQ ID NO: 5151 - RNA, 17 nt, Homo sapiens
cccgccgagcagagagc

SEQ ID NO: 5152 - RNA, 17 nt, Homo sapiens
agcagagagccagcccu

SEQ ID NO: 5153 - RNA, 17 nt, Homo sapiens
gagagccagcccucuga

SEQ ID NO: 5154 - RNA, 17 nt, Homo sapiens
gcccucugacguccauc

SEQ ID NO: 5155 - RNA, 17 nt, Homo sapiens
ccucugacguccaucau

SEQ ID NO: 5156 - RNA, 17 nt, Homo sapiens
ugacguccaucaucucu

SEQ ID NO: 5157 - RNA, 17 nt, Homo sapiens
cguccaucaucucugcg

SEQ ID NO: 5158 - RNA, 17 nt, Homo sapiens
ucaucucugcggugguu

SEQ ID NO: 5159 - RNA, 17 nt, Homo sapiens
ucucugcggugguuggc

SEQ ID NO: 5160 - RNA, 17 nt, Homo sapiens
cugcggugguuggcauu

SEQ ID NO: 5161 - RNA, 17 nt, Homo sapiens
ggugguuggcauucugc

SEQ ID NO: 5162 - RNA, 17 nt, Homo sapiens
ugguuggcauucugcug

SEQ ID NO: 5163 - RNA, 17 nt, Homo sapiens
ggcauucugcuggucgu

SEQ ID NO: 5164 - RNA, 17 nt, Homo sapiens
uucugcuggucgugguc

SEQ ID NO: 5165 - RNA, 17 nt, Homo sapiens
ugcuggucguggucuug

SEQ ID NO: 5166 - RNA, 17 nt, Homo sapiens
uggucguggucuugggg

SEQ ID NO: 5167 - RNA, 17 nt, Homo sapiens
ucuuggggguggucuuu

SEQ ID NO: 5168 - RNA, 17 nt, Homo sapiens
uggggguggucuuuggg

SEQ ID NO: 5169 - RNA, 17 nt, Homo sapiens
ucuuugggauccucauc

SEQ ID NO: 5170 - RNA, 17 nt, Homo sapiens
ggauccucaucaagcga

SEQ ID NO: 5171 - RNA, 17 nt, Homo sapiens
cucaucaagcgacggca

SEQ ID NO: 5172 - RNA, 17 nt, Homo sapiens
aucaagcgacggcagca

SEQ ID NO: 5173 - RNA, 17 nt, Homo sapiens
aagcgacggcagcagaa

SEQ ID NO: 5174 - RNA, 17 nt, Homo sapiens
cgacggcagcagaagau

SEQ ID NO: 5175 - RNA, 17 nt, Homo sapiens
agcagaagauccggaag

SEQ ID NO: 5176 - RNA, 17 nt, Homo sapiens
auccggaaguacacgau

SEQ ID NO: 5177 - RNA, 17 nt, Homo sapiens
ccggaaguacacgaugc

SEQ ID NO: 5178 - RNA, 17 nt, Homo sapiens
ggaaguacacgaugcgg

SEQ ID NO: 5179 - RNA, 17 nt, Homo sapiens
aguacacgaugcggaga

SEQ ID NO: 5180 - RNA, 17 nt, Homo sapiens
uacacgaugcggagacu

SEQ ID NO: 5181 - RNA, 17 nt, Homo sapiens
augcggagacugcugca

SEQ ID NO: 5182 - RNA, 17 nt, Homo sapiens
cggagacugcugcagga

SEQ ID NO: 5183 - RNA, 17 nt, Homo sapiens
agacugcugcaggaaac

SEQ ID NO: 5184 - RNA, 17 nt, Homo sapiens
ugcaggaaacggagcug

SEQ ID NO: 5185 - RNA, 17 nt, Homo sapiens
gaaacggagcuggugga

SEQ ID NO: 5186 - RNA, 17 nt, Homo sapiens
cggagcugguggagccg

SEQ ID NO: 5187 - RNA, 17 nt, Homo sapiens
cugguggagccgcugac

SEQ ID NO: 5188 - RNA, 17 nt, Homo sapiens
guggagccgcugacacc

SEQ ID NO: 5189 - RNA, 17 nt, Homo sapiens
agccgcugacaccuagc

SEQ ID NO: 5190 - RNA, 17 nt, Homo sapiens
ccgcugacaccuagcgg

SEQ ID NO: 5191 - RNA, 17 nt, Homo sapiens
gacaccuagcggagcga

SEQ ID NO: 5192 - RNA, 17 nt, Homo sapiens
cuagcggagcgaugccc

SEQ ID NO: 5193 - RNA, 17 nt, Homo sapiens
gcggagcgaugcccaac

SEQ ID NO: 5194 - RNA, 17 nt, Homo sapiens
ggagcgaugcccaacca

SEQ ID NO: 5195 - RNA, 17 nt, Homo sapiens
gaugcccaaccaggcgc

SEQ ID NO: 5196 - RNA, 17 nt, Homo sapiens
ccaaccaggcgcagaug

SEQ ID NO: 5197 - RNA, 17 nt, Homo sapiens
aaccaggcgcagaugcg

SEQ ID NO: 5198 - RNA, 17 nt, Homo sapiens
aggcgcagaugcggauc

SEQ ID NO: 5199 - RNA, 17 nt, Homo sapiens
gcgcagaugcggauccu

SEQ ID NO: 5200 - RNA, 17 nt, Homo sapiens
agaugcggauccugaaa

SEQ ID NO: 5201 - RNA, 17 nt, Homo sapiens
ugaaagagacggagcug

SEQ ID NO: 5202 - RNA, 17 nt, Homo sapiens
gagacggagcugaggaa

SEQ ID NO: 5203 - RNA, 17 nt, Homo sapiens
ugaggaaggugaaggug

SEQ ID NO: 5204 - RNA, 17 nt, Homo sapiens
aggugaaggugcuugga

SEQ ID NO: 5205 - RNA, 17 nt, Homo sapiens
gugaaggugcuuggauc

SEQ ID NO: 5206 - RNA, 17 nt, Homo sapiens
gugcuuggaucuggcgc

SEQ ID NO: 5207 - RNA, 17 nt, Homo sapiens
uggaucuggcgcuuuug

SEQ ID NO: 5208 - RNA, 17 nt, Homo sapiens
gaucuggcgcuuuuggc

SEQ ID NO: 5209 - RNA, 17 nt, Homo sapiens
cgcuuuuggcacagucu

SEQ ID NO: 5210 - RNA, 17 nt, Homo sapiens
cuuuuggcacagucuac

SEQ ID NO: 5211 - RNA, 17 nt, Homo sapiens
uuggcacagucuacaag

SEQ ID NO: 5212 - RNA, 17 nt, Homo sapiens
cacagucuacaagggca

SEQ ID NO: 5213 - RNA, 17 nt, Homo sapiens
cuacaagggcaucugga

SEQ ID NO: 5214 - RNA, 17 nt, Homo sapiens
acaagggcaucuggauc

SEQ ID NO: 5215 - RNA, 17 nt, Homo sapiens
gcaucuggaucccugau

SEQ ID NO: 5216 - RNA, 17 nt, Homo sapiens
gaucccugauggggaga

SEQ ID NO: 5217 - RNA, 17 nt, Homo sapiens
uggggagaaugugaaaa

SEQ ID NO: 5218 - RNA, 17 nt, Homo sapiens
gggagaaugugaaaauu

SEQ ID NO: 5219 - RNA, 17 nt, Homo sapiens
augugaaaauuccagug

SEQ ID NO: 5220 - RNA, 17 nt, Homo sapiens
aaauuccaguggccauc

SEQ ID NO: 5221 - RNA, 17 nt, Homo sapiens
uuccaguggccaucaaa

SEQ ID NO: 5222 - RNA, 17 nt, Homo sapiens
caguggccaucaaagug

SEQ ID NO: 5223 - RNA, 17 nt, Homo sapiens
ccaucaaaguguugagg

SEQ ID NO: 5224 - RNA, 17 nt, Homo sapiens
aucaaaguguugaggga

SEQ ID NO: 5225 - RNA, 17 nt, Homo sapiens
gagggaaaacacauccc

SEQ ID NO: 5226 - RNA, 17 nt, Homo sapiens
gggaaaacacauccccc

SEQ ID NO: 5227 - RNA, 17 nt, Homo sapiens
gaaaacacaucccccaa

SEQ ID NO: 5228 - RNA, 17 nt, Homo sapiens
cccccaaagccaacaaa

SEQ ID NO: 5229 - RNA, 17 nt, Homo sapiens
caaagccaacaaagaaa

SEQ ID NO: 5230 - RNA, 17 nt, Homo sapiens
acaaagaaaucuuagac

SEQ ID NO: 5231 - RNA, 17 nt, Homo sapiens
aaucuuagacgaagcau

SEQ ID NO: 5232 - RNA, 17 nt, Homo sapiens
uagacgaagcauacgug

SEQ ID NO: 5233 - RNA, 17 nt, Homo sapiens
gacgaagcauacgugau

SEQ ID NO: 5234 - RNA, 17 nt, Homo sapiens
cgaagcauacgugaugg

SEQ ID NO: 5235 - RNA, 17 nt, Homo sapiens
aagcauacgugauggcu

SEQ ID NO: 5236 - RNA, 17 nt, Homo sapiens
cauacgugauggcuggu

SEQ ID NO: 5237 - RNA, 17 nt, Homo sapiens
acgugauggcuggugug

SEQ ID NO: 5238 - RNA, 17 nt, Homo sapiens
gauggcuggugugggcu

SEQ ID NO: 5239 - RNA, 17 nt, Homo sapiens
uggcuggugugggcucc

SEQ ID NO: 5240 - RNA, 17 nt, Homo sapiens
uggugugggcuccccau

SEQ ID NO: 5241 - RNA, 17 nt, Homo sapiens
ggcuccccauaugucuc

SEQ ID NO: 5242 - RNA, 17 nt, Homo sapiens
cuccccauaugucuccc

SEQ ID NO: 5243 - RNA, 17 nt, Homo sapiens
ccccauaugucucccgc

SEQ ID NO: 5244 - RNA, 17 nt, Homo sapiens
ugucucccgccuucugg

SEQ ID NO: 5245 - RNA, 17 nt, Homo sapiens
ccuucugggcaucugcc

SEQ ID NO: 5246 - RNA, 17 nt, Homo sapiens
uucugggcaucugccug

SEQ ID NO: 5247 - RNA, 17 nt, Homo sapiens
gggcaucugccugacau

SEQ ID NO: 5248 - RNA, 17 nt, Homo sapiens
ucugccugacauccacg

SEQ ID NO: 5249 - RNA, 17 nt, Homo sapiens
ugccugacauccacggu

SEQ ID NO: 5250 - RNA, 17 nt, Homo sapiens
ugacauccacggugcag

SEQ ID NO: 5251 - RNA, 17 nt, Homo sapiens
cauccacggugcagcug

SEQ ID NO: 5252 - RNA, 17 nt, Homo sapiens
uccacggugcagcuggu

SEQ ID NO: 5253 - RNA, 17 nt, Homo sapiens
acggugcagcuggugac

SEQ ID NO: 5254 - RNA, 17 nt, Homo sapiens
ugcagcuggugacacag

SEQ ID NO: 5255 - RNA, 17 nt, Homo sapiens
agcuggugacacagcuu

SEQ ID NO: 5256 - RNA, 17 nt, Homo sapiens
cuggugacacagcuuau

SEQ ID NO: 5257 - RNA, 17 nt, Homo sapiens
gugacacagcuuaugcc

SEQ ID NO: 5258 - RNA, 17 nt, Homo sapiens
cacagcuuaugcccuau

SEQ ID NO: 5259 - RNA, 17 nt, Homo sapiens
cagcuuaugcccuaugg

SEQ ID NO: 5260 - RNA, 17 nt, Homo sapiens
uaugcccuauggcugcc

SEQ ID NO: 5261 - RNA, 17 nt, Homo sapiens
gcccuauggcugccucu

SEQ ID NO: 5262 - RNA, 17 nt, Homo sapiens
cuauggcugccucuuag

SEQ ID NO: 5263 - RNA, 17 nt, Homo sapiens
ccucuuagaccaugucc

SEQ ID NO: 5264 - RNA, 17 nt, Homo sapiens
cuuagaccauguccggg

SEQ ID NO: 5265 - RNA, 17 nt, Homo sapiens
uagaccauguccgggaa

SEQ ID NO: 5266 - RNA, 17 nt, Homo sapiens
ccgggaaaaccgcggac

SEQ ID NO: 5267 - RNA, 17 nt, Homo sapiens
ggaaaaccgcggacgcc

SEQ ID NO: 5268 - RNA, 17 nt, Homo sapiens
aaccgcggacgccuggg

SEQ ID NO: 5269 - RNA, 17 nt, Homo sapiens
ccgcggacgccugggcu

SEQ ID NO: 5270 - RNA, 17 nt, Homo sapiens
acgccugggcucccagg

SEQ ID NO: 5271 - RNA, 17 nt, Homo sapiens
cucccaggaccugcuga

SEQ ID NO: 5272 - RNA, 17 nt, Homo sapiens
caggaccugcugaacug

SEQ ID NO: 5273 - RNA, 17 nt, Homo sapiens
ccugcugaacuggugua

SEQ ID NO: 5274 - RNA, 17 nt, Homo sapiens
cugaacugguguaugca

SEQ ID NO: 5275 - RNA, 17 nt, Homo sapiens
gaacugguguaugcaga

SEQ ID NO: 5276 - RNA, 17 nt, Homo sapiens
acugguguaugcagauu

SEQ ID NO: 5277 - RNA, 17 nt, Homo sapiens
ugguguaugcagauugc

SEQ ID NO: 5278 - RNA, 17 nt, Homo sapiens
guaugcagauugccaag

SEQ ID NO: 5279 - RNA, 17 nt, Homo sapiens
ugcagauugccaagggg

SEQ ID NO: 5280 - RNA, 17 nt, Homo sapiens
ccaaggggaugagcuac

SEQ ID NO: 5281 - RNA, 17 nt, Homo sapiens
ggggaugagcuaccugg

SEQ ID NO: 5282 - RNA, 17 nt, Homo sapiens
gaugagcuaccuggagg

SEQ ID NO: 5283 - RNA, 17 nt, Homo sapiens
ccuggaggaugugcggc

SEQ ID NO: 5284 - RNA, 17 nt, Homo sapiens
uggaggaugugcggcuc

SEQ ID NO: 5285 - RNA, 17 nt, Homo sapiens
gaggaugugcggcucgu

SEQ ID NO: 5286 - RNA, 17 nt, Homo sapiens
gaugugcggcucguaca

SEQ ID NO: 5287 - RNA, 17 nt, Homo sapiens
ugcggcucguacacagg

SEQ ID NO: 5288 - RNA, 17 nt, Homo sapiens
cggcucguacacaggga

SEQ ID NO: 5289 - RNA, 17 nt, Homo sapiens
gcucguacacagggacu

SEQ ID NO: 5290 - RNA, 17 nt, Homo sapiens
acacagggacuuggccg

SEQ ID NO: 5291 - RNA, 17 nt, Homo sapiens
gggacuuggccgcucgg

SEQ ID NO: 5292 - RNA, 17 nt, Homo sapiens
acuuggccgcucggaac

SEQ ID NO: 5293 - RNA, 17 nt, Homo sapiens
cgcucggaacgugcugg

SEQ ID NO: 5294 - RNA, 17 nt, Homo sapiens
cucggaacgugcugguc

SEQ ID NO: 5295 - RNA, 17 nt, Homo sapiens
cggaacgugcuggucaa

SEQ ID NO: 5296 - RNA, 17 nt, Homo sapiens
acgugcuggucaagagu

SEQ ID NO: 5297 - RNA, 17 nt, Homo sapiens
ggucaagagucccaacc

SEQ ID NO: 5298 - RNA, 17 nt, Homo sapiens
gagucccaaccauguca

SEQ ID NO: 5299 - RNA, 17 nt, Homo sapiens
ucccaaccaugucaaaa

SEQ ID NO: 5300 - RNA, 17 nt, Homo sapiens
ccaaccaugucaaaauu

SEQ ID NO: 5301 - RNA, 17 nt, Homo sapiens
augucaaaauuacagac

SEQ ID NO: 5302 - RNA, 17 nt, Homo sapiens
ucaaaauuacagacuuc

SEQ ID NO: 5303 - RNA, 17 nt, Homo sapiens
aauuacagacuucgggc

SEQ ID NO: 5304 - RNA, 17 nt, Homo sapiens
gacuucgggcuggcucg

SEQ ID NO: 5305 - RNA, 17 nt, Homo sapiens
ucgggcuggcucggcug

SEQ ID NO: 5306 - RNA, 17 nt, Homo sapiens
cuggcucggcugcugga

SEQ ID NO: 5307 - RNA, 17 nt, Homo sapiens
gcucggcugcuggacau

SEQ ID NO: 5308 - RNA, 17 nt, Homo sapiens
gcugcuggacauugacg

SEQ ID NO: 5309 - RNA, 17 nt, Homo sapiens
ugcuggacauugacgag

SEQ ID NO: 5310 - RNA, 17 nt, Homo sapiens
ggacauugacgagacag

SEQ ID NO: 5311 - RNA, 17 nt, Homo sapiens
uugacgagacagaguac

SEQ ID NO: 5312 - RNA, 17 nt, Homo sapiens
gagacagaguaccaugc

SEQ ID NO: 5313 - RNA, 17 nt, Homo sapiens
gacagaguaccaugcag

SEQ ID NO: 5314 - RNA, 17 nt, Homo sapiens
agaguaccaugcagaug

SEQ ID NO: 5315 - RNA, 17 nt, Homo sapiens
aguaccaugcagauggg

SEQ ID NO: 5316 - RNA, 17 nt, Homo sapiens
ccaugcagaugggggca

SEQ ID NO: 5317 - RNA, 17 nt, Homo sapiens
agaugggggcaaggugc

SEQ ID NO: 5318 - RNA, 17 nt, Homo sapiens
ggggcaaggugcccauc

SEQ ID NO: 5319 - RNA, 17 nt, Homo sapiens
ggcaaggugcccaucaa

SEQ ID NO: 5320 - RNA, 17 nt, Homo sapiens
aggugcccaucaagugg

SEQ ID NO: 5321 - RNA, 17 nt, Homo sapiens
cccaucaaguggauggc

SEQ ID NO: 5322 - RNA, 17 nt, Homo sapiens
ucaaguggauggcgcug

SEQ ID NO: 5323 - RNA, 17 nt, Homo sapiens
aguggauggcgcuggag

SEQ ID NO: 5324 - RNA, 17 nt, Homo sapiens
uggauggcgcuggaguc

SEQ ID NO: 5325 - RNA, 17 nt, Homo sapiens
gcgcuggaguccauucu

SEQ ID NO: 5326 - RNA, 17 nt, Homo sapiens
uggaguccauucuccgc

SEQ ID NO: 5327 - RNA, 17 nt, Homo sapiens
cauucuccgccggcggu

SEQ ID NO: 5328 - RNA, 17 nt, Homo sapiens
cuccgccggcgguucac

SEQ ID NO: 5329 - RNA, 17 nt, Homo sapiens
cgccggcgguucaccca

SEQ ID NO: 5330 - RNA, 17 nt, Homo sapiens
ggcgguucacccaccag

SEQ ID NO: 5331 - RNA, 17 nt, Homo sapiens
guucacccaccagagug

SEQ ID NO: 5332 - RNA, 17 nt, Homo sapiens
ccaccagagugaugugu

SEQ ID NO: 5333 - RNA, 17 nt, Homo sapiens
ccagagugaugugugga

SEQ ID NO: 5334 - RNA, 17 nt, Homo sapiens
agagugauguguggagu

SEQ ID NO: 5335 - RNA, 17 nt, Homo sapiens
agugauguguggaguua

SEQ ID NO: 5336 - RNA, 17 nt, Homo sapiens
uguguggaguuauggug

SEQ ID NO: 5337 - RNA, 17 nt, Homo sapiens
guggaguuaugguguga

SEQ ID NO: 5338 - RNA, 17 nt, Homo sapiens
gaguuauggugugacug

SEQ ID NO: 5339 - RNA, 17 nt, Homo sapiens
guuauggugugacugug

SEQ ID NO: 5340 - RNA, 17 nt, Homo sapiens
auggugugacugugugg

SEQ ID NO: 5341 - RNA, 17 nt, Homo sapiens
gugugacugugugggag

SEQ ID NO: 5342 - RNA, 17 nt, Homo sapiens
gugacugugugggagcu

SEQ ID NO: 5343 - RNA, 17 nt, Homo sapiens
gugugggagcugaugac

SEQ ID NO: 5344 - RNA, 17 nt, Homo sapiens
gggagcugaugacuuuu

SEQ ID NO: 5345 - RNA, 17 nt, Homo sapiens
agcugaugacuuuuggg

SEQ ID NO: 5346 - RNA, 17 nt, Homo sapiens
cuuuuggggccaaaccu

SEQ ID NO: 5347 - RNA, 17 nt, Homo sapiens
ggggccaaaccuuacga

SEQ ID NO: 5348 - RNA, 17 nt, Homo sapiens
caaaccuuacgauggga

SEQ ID NO: 5349 - RNA, 17 nt, Homo sapiens
accuuacgaugggaucc

SEQ ID NO: 5350 - RNA, 17 nt, Homo sapiens
acgaugggaucccagcc

SEQ ID NO: 5351 - RNA, 17 nt, Homo sapiens
ggaucccagcccgggag

SEQ ID NO: 5352 - RNA, 17 nt, Homo sapiens
cccgggagaucccugac

SEQ ID NO: 5353 - RNA, 17 nt, Homo sapiens
gaucccugaccugcugg

SEQ ID NO: 5354 - RNA, 17 nt, Homo sapiens
ccugaccugcuggaaaa

SEQ ID NO: 5355 - RNA, 17 nt, Homo sapiens
aagggggagcggcugcc

SEQ ID NO: 5356 - RNA, 17 nt, Homo sapiens
ggggagcggcugcccca

SEQ ID NO: 5357 - RNA, 17 nt, Homo sapiens
gagcggcugccccagcc

SEQ ID NO: 5358 - RNA, 17 nt, Homo sapiens
cugccccagccccccau

SEQ ID NO: 5359 - RNA, 17 nt, Homo sapiens
agccccccaucugcacc

SEQ ID NO: 5360 - RNA, 17 nt, Homo sapiens
ccccaucugcaccauug

SEQ ID NO: 5361 - RNA, 17 nt, Homo sapiens
ccaucugcaccauugau

SEQ ID NO: 5362 - RNA, 17 nt, Homo sapiens
ucugcaccauugauguc

SEQ ID NO: 5363 - RNA, 17 nt, Homo sapiens
caccauugaugucuaca

SEQ ID NO: 5364 - RNA, 17 nt, Homo sapiens
ccauugaugucuacaug

SEQ ID NO: 5365 - RNA, 17 nt, Homo sapiens
ugaugucuacaugauca

SEQ ID NO: 5366 - RNA, 17 nt, Homo sapiens
augucuacaugaucaug

SEQ ID NO: 5367 - RNA, 17 nt, Homo sapiens
ucuacaugaucaugguc

SEQ ID NO: 5368 - RNA, 17 nt, Homo sapiens
acaugaucauggucaaa

SEQ ID NO: 5369 - RNA, 17 nt, Homo sapiens
ugaucauggucaaaugu

SEQ ID NO: 5370 - RNA, 17 nt, Homo sapiens
auggucaaauguuggau

SEQ ID NO: 5371 - RNA, 17 nt, Homo sapiens
ggucaaauguuggauga

SEQ ID NO: 5372 - RNA, 17 nt, Homo sapiens
aauguuggaugauugac

SEQ ID NO: 5373 - RNA, 17 nt, Homo sapiens
guuggaugauugacucu

SEQ ID NO: 5374 - RNA, 17 nt, Homo sapiens
gaugauugacucugaau

SEQ ID NO: 5375 - RNA, 17 nt, Homo sapiens
gacucugaaugucggcc

SEQ ID NO: 5376 - RNA, 17 nt, Homo sapiens
cucugaaugucggccaa

SEQ ID NO: 5377 - RNA, 17 nt, Homo sapiens
gaaugucggccaagauu

SEQ ID NO: 5378 - RNA, 17 nt, Homo sapiens
cggccaagauuccggga

SEQ ID NO: 5379 - RNA, 17 nt, Homo sapiens
uuccgggaguugguguc

SEQ ID NO: 5380 - RNA, 17 nt, Homo sapiens
gggaguuggugucugaa

SEQ ID NO: 5381 - RNA, 17 nt, Homo sapiens
gaguuggugucugaauu

SEQ ID NO: 5382 - RNA, 17 nt, Homo sapiens
gugucugaauucucccg

SEQ ID NO: 5383 - RNA, 17 nt, Homo sapiens
auucucccgcauggcca

SEQ ID NO: 5384 - RNA, 17 nt, Homo sapiens
ucucccgcauggccagg

SEQ ID NO: 5385 - RNA, 17 nt, Homo sapiens
cccgcauggccagggac

SEQ ID NO: 5386 - RNA, 17 nt, Homo sapiens
ggccagggacccccagc

SEQ ID NO: 5387 - RNA, 17 nt, Homo sapiens
gacccccagcgcuuugu

SEQ ID NO: 5388 - RNA, 17 nt, Homo sapiens
cccccagcgcuuugugg

SEQ ID NO: 5389 - RNA, 17 nt, Homo sapiens
agcgcuuuguggucauc

SEQ ID NO: 5390 - RNA, 17 nt, Homo sapiens
gcuuuguggucauccag

SEQ ID NO: 5391 - RNA, 17 nt, Homo sapiens
uuguggucauccagaau

SEQ ID NO: 5392 - RNA, 17 nt, Homo sapiens
cauccagaaugaggacu

SEQ ID NO: 5393 - RNA, 17 nt, Homo sapiens
gaaugaggacuugggcc

SEQ ID NO: 5394 - RNA, 17 nt, Homo sapiens
ggacuugggcccagcca

SEQ ID NO: 5395 - RNA, 17 nt, Homo sapiens
ugggcccagccaguccc

SEQ ID NO: 5396 - RNA, 17 nt, Homo sapiens
cccagccagucccuugg

SEQ ID NO: 5397 - RNA, 17 nt, Homo sapiens
ucccuuggacagcaccu

SEQ ID NO: 5398 - RNA, 17 nt, Homo sapiens
cuuggacagcaccuucu

SEQ ID NO: 5399 - RNA, 17 nt, Homo sapiens
uggacagcaccuucuac

SEQ ID NO: 5400 - RNA, 17 nt, Homo sapiens
caccuucuaccgcucac

SEQ ID NO: 5401 - RNA, 17 nt, Homo sapiens
cuucuaccgcucacugc

SEQ ID NO: 5402 - RNA, 17 nt, Homo sapiens
uaccgcucacugcugga

SEQ ID NO: 5403 - RNA, 17 nt, Homo sapiens
cgcucacugcuggagga

SEQ ID NO: 5404 - RNA, 17 nt, Homo sapiens
gcuggaggacgaugaca

SEQ ID NO: 5405 - RNA, 17 nt, Homo sapiens
ggaggacgaugacaugg

SEQ ID NO: 5406 - RNA, 17 nt, Homo sapiens
ggacgaugacauggggg

SEQ ID NO: 5407 - RNA, 17 nt, Homo sapiens
acgaugacaugggggac

SEQ ID NO: 5408 - RNA, 17 nt, Homo sapiens
caugggggaccuggugg

SEQ ID NO: 5409 - RNA, 17 nt, Homo sapiens
gggaccugguggaugcu

SEQ ID NO: 5410 - RNA, 17 nt, Homo sapiens
ccugguggaugcugagg

SEQ ID NO: 5411 - RNA, 17 nt, Homo sapiens
ugguggaugcugaggag

SEQ ID NO: 5412 - RNA, 17 nt, Homo sapiens
gcugaggaguaucuggu

SEQ ID NO: 5413 - RNA, 17 nt, Homo sapiens
ugaggaguaucugguac

SEQ ID NO: 5414 - RNA, 17 nt, Homo sapiens
aguaucugguaccccag

SEQ ID NO: 5415 - RNA, 17 nt, Homo sapiens
uaucugguaccccagca

SEQ ID NO: 5416 - RNA, 17 nt, Homo sapiens
guaccccagcagggcuu

SEQ ID NO: 5417 - RNA, 17 nt, Homo sapiens
ccagcagggcuucuucu

SEQ ID NO: 5418 - RNA, 17 nt, Homo sapiens
cuucuucuguccagacc

SEQ ID NO: 5419 - RNA, 17 nt, Homo sapiens
cuguccagacccugccc

SEQ ID NO: 5420 - RNA, 17 nt, Homo sapiens
cagacccugccccgggc

SEQ ID NO: 5421 - RNA, 17 nt, Homo sapiens
ugccccgggcgcugggg

SEQ ID NO: 5422 - RNA, 17 nt, Homo sapiens
ccccgggcgcugggggc

SEQ ID NO: 5423 - RNA, 17 nt, Homo sapiens
cgcugggggcauggucc

SEQ ID NO: 5424 - RNA, 17 nt, Homo sapiens
cugggggcaugguccac

SEQ ID NO: 5425 - RNA, 17 nt, Homo sapiens
ggggcaugguccaccac

SEQ ID NO: 5426 - RNA, 17 nt, Homo sapiens
caugguccaccacaggc

SEQ ID NO: 5427 - RNA, 17 nt, Homo sapiens
gguccaccacaggcacc

SEQ ID NO: 5428 - RNA, 17 nt, Homo sapiens
caccacaggcaccgcag

SEQ ID NO: 5429 - RNA, 17 nt, Homo sapiens
ccacaggcaccgcagcu

SEQ ID NO: 5430 - RNA, 17 nt, Homo sapiens
caggcaccgcagcucau

SEQ ID NO: 5431 - RNA, 17 nt, Homo sapiens
gcaccgcagcucaucua

SEQ ID NO: 5432 - RNA, 17 nt, Homo sapiens
cgcagcucaucuaccag

SEQ ID NO: 5433 - RNA, 17 nt, Homo sapiens
gcucaucuaccaggagu

SEQ ID NO: 5434 - RNA, 17 nt, Homo sapiens
uaccaggaguggcggug

SEQ ID NO: 5435 - RNA, 17 nt, Homo sapiens
caggaguggcggugggg

SEQ ID NO: 5436 - RNA, 17 nt, Homo sapiens
gaguggcgguggggacc

SEQ ID NO: 5437 - RNA, 17 nt, Homo sapiens
cgguggggaccugacac

SEQ ID NO: 5438 - RNA, 17 nt, Homo sapiens
gggaccugacacuaggg

SEQ ID NO: 5439 - RNA, 17 nt, Homo sapiens
gaccugacacuagggcu

SEQ ID NO: 5440 - RNA, 17 nt, Homo sapiens
acacuagggcuggagcc

SEQ ID NO: 5441 - RNA, 17 nt, Homo sapiens
gggcuggagcccucuga

SEQ ID NO: 5442 - RNA, 17 nt, Homo sapiens
aagaggaggcccccagg

SEQ ID NO: 5443 - RNA, 17 nt, Homo sapiens
gcccccaggucuccacu

SEQ ID NO: 5444 - RNA, 17 nt, Homo sapiens
aggucuccacuggcacc

SEQ ID NO: 5445 - RNA, 17 nt, Homo sapiens
cuccacuggcacccucc

SEQ ID NO: 5446 - RNA, 17 nt, Homo sapiens
ccacuggcacccuccga

SEQ ID NO: 5447 - RNA, 17 nt, Homo sapiens
ccgaaggggcuggcucc

SEQ ID NO: 5448 - RNA, 17 nt, Homo sapiens
aggggcuggcuccgaug

SEQ ID NO: 5449 - RNA, 17 nt, Homo sapiens
uggcuccgauguauuug

SEQ ID NO: 5450 - RNA, 17 nt, Homo sapiens
gcuccgauguauuugau

SEQ ID NO: 5451 - RNA, 17 nt, Homo sapiens
uccgauguauuugaugg

SEQ ID NO: 5452 - RNA, 17 nt, Homo sapiens
uguauuugauggugacc

SEQ ID NO: 5453 - RNA, 17 nt, Homo sapiens
auuugauggugaccugg

SEQ ID NO: 5454 - RNA, 17 nt, Homo sapiens
ugauggugaccugggaa

SEQ ID NO: 5455 - RNA, 17 nt, Homo sapiens
accugggaaugggggca

SEQ ID NO: 5456 - RNA, 17 nt, Homo sapiens
gaaugggggcagccaag

SEQ ID NO: 5457 - RNA, 17 nt, Homo sapiens
ugggggcagccaagggg

SEQ ID NO: 5458 - RNA, 17 nt, Homo sapiens
gccaaggggcugcaaag

SEQ ID NO: 5459 - RNA, 17 nt, Homo sapiens
aaggggcugcaaagccu

SEQ ID NO: 5460 - RNA, 17 nt, Homo sapiens
gcugcaaagccucccca

SEQ ID NO: 5461 - RNA, 17 nt, Homo sapiens
gccuccccacacaugac

SEQ ID NO: 5462 - RNA, 17 nt, Homo sapiens
cuccccacacaugaccc

SEQ ID NO: 5463 - RNA, 17 nt, Homo sapiens
ccccacacaugacccca

SEQ ID NO: 5464 - RNA, 17 nt, Homo sapiens
cacacaugaccccagcc

SEQ ID NO: 5465 - RNA, 17 nt, Homo sapiens
ugaccccagcccucuac

SEQ ID NO: 5466 - RNA, 17 nt, Homo sapiens
agcccucuacagcggua

SEQ ID NO: 5467 - RNA, 17 nt, Homo sapiens
ccucuacagcgguacag

SEQ ID NO: 5468 - RNA, 17 nt, Homo sapiens
cuacagcgguacaguga

SEQ ID NO: 5469 - RNA, 17 nt, Homo sapiens
acagcgguacagugagg

SEQ ID NO: 5470 - RNA, 17 nt, Homo sapiens
gcgguacagugaggacc

SEQ ID NO: 5471 - RNA, 17 nt, Homo sapiens
cagugaggaccccacag

SEQ ID NO: 5472 - RNA, 17 nt, Homo sapiens
aggaccccacaguaccc

SEQ ID NO: 5473 - RNA, 17 nt, Homo sapiens
accccacaguaccccug

SEQ ID NO: 5474 - RNA, 17 nt, Homo sapiens
cccacaguaccccugcc

SEQ ID NO: 5475 - RNA, 17 nt, Homo sapiens
guaccccugcccucuga

SEQ ID NO: 5476 - RNA, 17 nt, Homo sapiens
ccucugagacugauggc

SEQ ID NO: 5477 - RNA, 17 nt, Homo sapiens
ugagacugauggcuacg

SEQ ID NO: 5478 - RNA, 17 nt, Homo sapiens
gacugauggcuacguug

SEQ ID NO: 5479 - RNA, 17 nt, Homo sapiens
ugauggcuacguugccc

SEQ ID NO: 5480 - RNA, 17 nt, Homo sapiens
auggcuacguugccccc

SEQ ID NO: 5481 - RNA, 17 nt, Homo sapiens
gcuacguugccccccug

SEQ ID NO: 5482 - RNA, 17 nt, Homo sapiens
ccccccugaccugcagc

SEQ ID NO: 5483 - RNA, 17 nt, Homo sapiens
ccugaccugcagccccc

SEQ ID NO: 5484 - RNA, 17 nt, Homo sapiens
gaccugcagcccccagc

SEQ ID NO: 5485 - RNA, 17 nt, Homo sapiens
agcccccagccugaaua

SEQ ID NO: 5486 - RNA, 17 nt, Homo sapiens
cagccugaauaugugaa

SEQ ID NO: 5487 - RNA, 17 nt, Homo sapiens
gccugaauaugugaacc

SEQ ID NO: 5488 - RNA, 17 nt, Homo sapiens
cugaauaugugaaccag

SEQ ID NO: 5489 - RNA, 17 nt, Homo sapiens
auaugugaaccagccag

SEQ ID NO: 5490 - RNA, 17 nt, Homo sapiens
gugaaccagccagaugu

SEQ ID NO: 5491 - RNA, 17 nt, Homo sapiens
ccagccagauguucggc

SEQ ID NO: 5492 - RNA, 17 nt, Homo sapiens
agccagauguucggccc

SEQ ID NO: 5493 - RNA, 17 nt, Homo sapiens
gauguucggccccagcc

SEQ ID NO: 5494 - RNA, 17 nt, Homo sapiens
cggccccagcccccuuc

SEQ ID NO: 5495 - RNA, 17 nt, Homo sapiens
cccccuucgccccgaga

SEQ ID NO: 5496 - RNA, 17 nt, Homo sapiens
ccgagagggcccucugc

SEQ ID NO: 5497 - RNA, 17 nt, Homo sapiens
ggcccucugccugcugc

SEQ ID NO: 5498 - RNA, 17 nt, Homo sapiens
cucugccugcugcccga

SEQ ID NO: 5499 - RNA, 17 nt, Homo sapiens
ugccugcugcccgaccu

SEQ ID NO: 5500 - RNA, 17 nt, Homo sapiens
gcugcccgaccugcugg

SEQ ID NO: 5501 - RNA, 17 nt, Homo sapiens
cccgaccugcuggugcc

SEQ ID NO: 5502 - RNA, 17 nt, Homo sapiens
accugcuggugccacuc

SEQ ID NO: 5503 - RNA, 17 nt, Homo sapiens
cugcuggugccacucug

SEQ ID NO: 5504 - RNA, 17 nt, Homo sapiens
cuggugccacucuggaa

SEQ ID NO: 5505 - RNA, 17 nt, Homo sapiens
cuggaaaggcccaagac

SEQ ID NO: 5506 - RNA, 17 nt, Homo sapiens
ggcccaagacucucucc

SEQ ID NO: 5507 - RNA, 17 nt, Homo sapiens
agggaagaauggggucg

SEQ ID NO: 5508 - RNA, 17 nt, Homo sapiens
agaauggggucgucaaa

SEQ ID NO: 5509 - RNA, 17 nt, Homo sapiens
auggggucgucaaagac

SEQ ID NO: 5510 - RNA, 17 nt, Homo sapiens
cgucaaagacguuuuug

SEQ ID NO: 5511 - RNA, 17 nt, Homo sapiens
ucaaagacguuuuugcc

SEQ ID NO: 5512 - RNA, 17 nt, Homo sapiens
acguuuuugccuuuggg

SEQ ID NO: 5513 - RNA, 17 nt, Homo sapiens
cuuugggggugccgugg

SEQ ID NO: 5514 - RNA, 17 nt, Homo sapiens
uugggggugccguggag

SEQ ID NO: 5515 - RNA, 17 nt, Homo sapiens
ggggugccguggagaac

SEQ ID NO: 5516 - RNA, 17 nt, Homo sapiens
cguggagaaccccgagu

SEQ ID NO: 5517 - RNA, 17 nt, Homo sapiens
aaccccgaguacuugac

SEQ ID NO: 5518 - RNA, 17 nt, Homo sapiens
ccccgaguacuugacac

SEQ ID NO: 5519 - RNA, 17 nt, Homo sapiens
aguacuugacaccccag

SEQ ID NO: 5520 - RNA, 17 nt, Homo sapiens
uacuugacaccccaggg

SEQ ID NO: 5521 - RNA, 17 nt, Homo sapiens
agggaggagcugccccu

SEQ ID NO: 5522 - RNA, 17 nt, Homo sapiens
gaggagcugccccucag

SEQ ID NO: 5523 - RNA, 17 nt, Homo sapiens
gccccucagccccaccc

SEQ ID NO: 5524 - RNA, 17 nt, Homo sapiens
ucagccccacccuccuc

SEQ ID NO: 5525 - RNA, 17 nt, Homo sapiens
cuccuccugccuucagc

SEQ ID NO: 5526 - RNA, 17 nt, Homo sapiens
ugccuucagcccagccu

SEQ ID NO: 5527 - RNA, 17 nt, Homo sapiens
ucagcccagccuucgac

SEQ ID NO: 5528 - RNA, 17 nt, Homo sapiens
agccuucgacaaccucu

SEQ ID NO: 5529 - RNA, 17 nt, Homo sapiens
cuucgacaaccucuauu

SEQ ID NO: 5530 - RNA, 17 nt, Homo sapiens
caaccucuauuacuggg

SEQ ID NO: 5531 - RNA, 17 nt, Homo sapiens
ccucuauuacugggacc

SEQ ID NO: 5532 - RNA, 17 nt, Homo sapiens
uuacugggaccaggacc

SEQ ID NO: 5533 - RNA, 17 nt, Homo sapiens
ggaccaggacccaccag

SEQ ID NO: 5534 - RNA, 17 nt, Homo sapiens
caggacccaccagagcg

SEQ ID NO: 5535 - RNA, 17 nt, Homo sapiens
ccaccagagcggggggc

SEQ ID NO: 5536 - RNA, 17 nt, Homo sapiens
agcggggggcuccaccc

SEQ ID NO: 5537 - RNA, 17 nt, Homo sapiens
ggggcuccacccagcac

SEQ ID NO: 5538 - RNA, 17 nt, Homo sapiens
uccacccagcaccuuca

SEQ ID NO: 5539 - RNA, 17 nt, Homo sapiens
cacccagcaccuucaaa

SEQ ID NO: 5540 - RNA, 17 nt, Homo sapiens
ucaaagggacaccuacg

SEQ ID NO: 5541 - RNA, 17 nt, Homo sapiens
aaagggacaccuacggc

SEQ ID NO: 5542 - RNA, 17 nt, Homo sapiens
ggacaccuacggcagag

SEQ ID NO: 5543 - RNA, 17 nt, Homo sapiens
caccuacggcagagaac

SEQ ID NO: 5544 - RNA, 17 nt, Homo sapiens
ggcagagaacccagagu

SEQ ID NO: 5545 - RNA, 17 nt, Homo sapiens
aacccagaguaccuggg

SEQ ID NO: 5546 - RNA, 17 nt, Homo sapiens
cccagaguaccuggguc

SEQ ID NO: 5547 - RNA, 17 nt, Homo sapiens
guaccugggucuggacg

SEQ ID NO: 5548 - RNA, 17 nt, Homo sapiens
gggucuggacgugccag

SEQ ID NO: 5549 - RNA, 17 nt, Homo sapiens
gucuggacgugccagug

SEQ ID NO: 5550 - RNA, 17 nt, Homo sapiens
cuggacgugccagugug

SEQ ID NO: 5551 - RNA, 17 nt, Homo sapiens
acgugccagugugaacc

SEQ ID NO: 5552 - RNA, 17 nt, Homo sapiens
gugccagugugaaccag

SEQ ID NO: 5553 - RNA, 17 nt, Homo sapiens
cagugugaaccagaagg

SEQ ID NO: 5554 - RNA, 17 nt, Homo sapiens
accagaaggccaagucc

SEQ ID NO: 5555 - RNA, 17 nt, Homo sapiens
aaggccaaguccgcaga

SEQ ID NO: 5556 - RNA, 17 nt, Homo sapiens
ccaaguccgcagaagcc

SEQ ID NO: 5557 - RNA, 17 nt, Homo sapiens
ccgcagaagcccugaug

SEQ ID NO: 5558 - RNA, 17 nt, Homo sapiens
aagcccugauguguccu

SEQ ID NO: 5559 - RNA, 17 nt, Homo sapiens
gcccugauguguccuca

SEQ ID NO: 5560 - RNA, 17 nt, Homo sapiens
ccugauguguccucagg

SEQ ID NO: 5561 - RNA, 17 nt, Homo sapiens
cucagggagcagggaag

SEQ ID NO: 5562 - RNA, 17 nt, Homo sapiens
cagggaaggccugacuu

SEQ ID NO: 5563 - RNA, 17 nt, Homo sapiens
aaggccugacuucugcu

SEQ ID NO: 5564 - RNA, 17 nt, Homo sapiens
ugacuucugcuggcauc

SEQ ID NO: 5565 - RNA, 17 nt, Homo sapiens
uucugcuggcaucaaga

SEQ ID NO: 5566 - RNA, 17 nt, Homo sapiens
cugcuggcaucaagagg

SEQ ID NO: 5567 - RNA, 17 nt, Homo sapiens
aucaagaggugggaggg

SEQ ID NO: 5568 - RNA, 17 nt, Homo sapiens
gugggagggcccuccga

SEQ ID NO: 5569 - RNA, 17 nt, Homo sapiens
gcccuccgaccacuucc

SEQ ID NO: 5570 - RNA, 17 nt, Homo sapiens
cuccgaccacuuccagg

SEQ ID NO: 5571 - RNA, 17 nt, Homo sapiens
ccaggggaaccugccau

SEQ ID NO: 5572 - RNA, 17 nt, Homo sapiens
gggaaccugccaugcca

SEQ ID NO: 5573 - RNA, 17 nt, Homo sapiens
aaccugccaugccagga

SEQ ID NO: 5574 - RNA, 17 nt, Homo sapiens
ccugccaugccaggaac

SEQ ID NO: 5575 - RNA, 17 nt, Homo sapiens
ugccaggaaccuguccu

SEQ ID NO: 5576 - RNA, 17 nt, Homo sapiens
aggaaccuguccuaagg

SEQ ID NO: 5577 - RNA, 17 nt, Homo sapiens
ccuaaggaaccuuccuu

SEQ ID NO: 5578 - RNA, 17 nt, Homo sapiens
uccuuccugcuugaguu

SEQ ID NO: 5579 - RNA, 17 nt, Homo sapiens
cugcuugaguucccaga

SEQ ID NO: 5580 - RNA, 17 nt, Homo sapiens
guucccagauggcugga

SEQ ID NO: 5581 - RNA, 17 nt, Homo sapiens
cccagauggcuggaagg

SEQ ID NO: 5582 - RNA, 17 nt, Homo sapiens
uggaagggguccagccu

SEQ ID NO: 5583 - RNA, 17 nt, Homo sapiens
gggguccagccucguug

SEQ ID NO: 5584 - RNA, 17 nt, Homo sapiens
ccagccucguuggaaga

SEQ ID NO: 5585 - RNA, 17 nt, Homo sapiens
gaagaggaacagcacug

SEQ ID NO: 5586 - RNA, 17 nt, Homo sapiens
gaggaacagcacugggg

SEQ ID NO: 5587 - RNA, 17 nt, Homo sapiens
ggaacagcacuggggag

SEQ ID NO: 5588 - RNA, 17 nt, Homo sapiens
acuggggagucuuugug

SEQ ID NO: 5589 - RNA, 17 nt, Homo sapiens
gagucuuuguggauucu

SEQ ID NO: 5590 - RNA, 17 nt, Homo sapiens
cuuuguggauucugagg

SEQ ID NO: 5591 - RNA, 17 nt, Homo sapiens
auucugaggcccugccc

SEQ ID NO: 5592 - RNA, 17 nt, Homo sapiens
gaggcccugcccaauga

SEQ ID NO: 5593 - RNA, 17 nt, Homo sapiens
ccugcccaaugagacuc

SEQ ID NO: 5594 - RNA, 17 nt, Homo sapiens
ccaaugagacucuaggg

SEQ ID NO: 5595 - RNA, 17 nt, Homo sapiens
acucuaggguccagugg

SEQ ID NO: 5596 - RNA, 17 nt, Homo sapiens
aggguccaguggaugcc

SEQ ID NO: 5597 - RNA, 17 nt, Homo sapiens
uccaguggaugccacag

SEQ ID NO: 5598 - RNA, 17 nt, Homo sapiens
caguggaugccacagcc

SEQ ID NO: 5599 - RNA, 17 nt, Homo sapiens
uggaugccacagcccag

SEQ ID NO: 5600 - RNA, 17 nt, Homo sapiens
augccacagcccagcuu

SEQ ID NO: 5601 - RNA, 17 nt, Homo sapiens
acagcccagcuuggccc

SEQ ID NO: 5602 - RNA, 17 nt, Homo sapiens
ccagcuuggcccuuucc

SEQ ID NO: 5603 - RNA, 17 nt, Homo sapiens
ccuuccagauccugggu

SEQ ID NO: 5604 - RNA, 17 nt, Homo sapiens
gauccuggguacugaaa

SEQ ID NO: 5605 - RNA, 17 nt, Homo sapiens
uccuggguacugaaagc

SEQ ID NO: 5606 - RNA, 17 nt, Homo sapiens
uacugaaagccuuaggg

SEQ ID NO: 5607 - RNA, 17 nt, Homo sapiens
uuagggaagcuggccug

SEQ ID NO: 5608 - RNA, 17 nt, Homo sapiens
ggaagcuggccugagag

SEQ ID NO: 5609 - RNA, 17 nt, Homo sapiens
gaggggaagcggcccua

SEQ ID NO: 5610 - RNA, 17 nt, Homo sapiens
gggaagcggcccuaagg

SEQ ID NO: 5611 - RNA, 17 nt, Homo sapiens
cuaagggagugucuaag

SEQ ID NO: 5612 - RNA, 17 nt, Homo sapiens
aagggagugucuaagaa

SEQ ID NO: 5613 - RNA, 17 nt, Homo sapiens
gucuaagaacaaaagcg

SEQ ID NO: 5614 - RNA, 17 nt, Homo sapiens
gaacaaaagcgacccau

SEQ ID NO: 5615 - RNA, 17 nt, Homo sapiens
caaaagcgacccauuca

SEQ ID NO: 5616 - RNA, 17 nt, Homo sapiens
agcgacccauucagaga

SEQ ID NO: 5617 - RNA, 17 nt, Homo sapiens
auucagagacugucccu

SEQ ID NO: 5618 - RNA, 17 nt, Homo sapiens
cagagacugucccugaa

SEQ ID NO: 5619 - RNA, 17 nt, Homo sapiens
ucccugaaaccuaguac

SEQ ID NO: 5620 - RNA, 17 nt, Homo sapiens
gaaaccuaguacugccc

SEQ ID NO: 5621 - RNA, 17 nt, Homo sapiens
aaccuaguacugccccc

SEQ ID NO: 5622 - RNA, 17 nt, Homo sapiens
cuaguacugccccccau

SEQ ID NO: 5623 - RNA, 17 nt, Homo sapiens
ugccccccaugaggaag

SEQ ID NO: 5624 - RNA, 17 nt, Homo sapiens
aggaaggaacagcaaug

SEQ ID NO: 5625 - RNA, 17 nt, Homo sapiens
aaggaacagcaauggug

SEQ ID NO: 5626 - RNA, 17 nt, Homo sapiens
gaacagcaaugguguca

SEQ ID NO: 5627 - RNA, 17 nt, Homo sapiens
cagcaauggugucagua

SEQ ID NO: 5628 - RNA, 17 nt, Homo sapiens
gcaauggugucaguauc

SEQ ID NO: 5629 - RNA, 17 nt, Homo sapiens
uggugucaguauccagg

SEQ ID NO: 5630 - RNA, 17 nt, Homo sapiens
gugucaguauccaggcu

SEQ ID NO: 5631 - RNA, 17 nt, Homo sapiens
guauccaggcuuuguac

SEQ ID NO: 5632 - RNA, 17 nt, Homo sapiens
caggcuuuguacagagu

SEQ ID NO: 5633 - RNA, 17 nt, Homo sapiens
ggcuuuguacagagugc

SEQ ID NO: 5634 - RNA, 17 nt, Homo sapiens
uguacagagugcuuuuc

SEQ ID NO: 5635 - RNA, 17 nt, Homo sapiens
uacagagugcuuuucug

SEQ ID NO: 5636 - RNA, 17 nt, Homo sapiens
gcuuuucuguuuaguuu

SEQ ID NO: 5637 - RNA, 17 nt, Homo sapiens
ucuguuuaguuuuuacu

SEQ ID NO: 5638 - RNA, 17 nt, Homo sapiens
uaguuuuuacuuuuuuu

SEQ ID NO: 5639 - RNA, 17 nt, Homo sapiens
cuuuuuuuguuuuguuu

SEQ ID NO: 5640 - RNA, 17 nt, Homo sapiens
uuuguuuuguuuuuuua

SEQ ID NO: 5641 - RNA, 17 nt, Homo sapiens
uuuuaaagaugaaauaa

SEQ ID NO: 5642 - RNA, 17 nt, Homo sapiens
aagaugaaauaaagacc

SEQ ID NO: 5643 - RNA, 17 nt, Homo sapiens
aaauaaagacccagggg

SEQ ID NO: 5644 - DNA, 31 bp, Artificial Sequence
  Description of Artificial Sequence:  Enzymatic Nucleic Acid
cagggttaggctagctacaacgactcccctt

SEQ ID NO: 5645 - DNA, 31 bp, Artificial Sequence
  Description of Artificial Sequence:  Enzymatic Nucleic Acid
ggccagggggctagctacaacgatacctccc

SEQ ID NO: 5646 - DNA, 31 bp, Artificial Sequence
  Description of Artificial Sequence:  Enzymatic Nucleic Acid
caaaggggggctagctacaacgacagggtta

SEQ ID NO: 5647 - DNA, 31 bp, Artificial Sequence
  Description of Artificial Sequence:  Enzymatic Nucleic Acid
ggccccgaggctagctacaacgacaaagggg

SEQ ID NO: 5648 - DNA, 31 bp, Artificial Sequence
  Description of Artificial Sequence:  Enzymatic Nucleic Acid
gcccggggggctagctacaacgacccgacca

SEQ ID NO: 5649 - DNA, 31 bp, Artificial Sequence
  Description of Artificial Sequence:  Enzymatic Nucleic Acid
cgcggctgggctagctacaacgaccggggcc

SEQ ID NO: 5650 - DNA, 31 bp, Artificial Sequence
  Description of Artificial Sequence:  Enzymatic Nucleic Acid
gcgcgcggggctagctacaacgatgcccggg

SEQ ID NO: 5651 - DNA, 31 bp, Artificial Sequence
  Description of Artificial Sequence:  Enzymatic Nucleic Acid
ggggcgcgggctagctacaacgaggctgccc

SEQ ID NO: 5652 - DNA, 31 bp, Artificial Sequence
  Description of Artificial Sequence:  Enzymatic Nucleic Acid
aaggggcgggctagctacaacgagcggctgc

SEQ ID NO: 5653 - DNA, 31 bp, Artificial Sequence
  Description of Artificial Sequence:  Enzymatic Nucleic Acid
ggaaggggggctagctacaacgagcgcggct

SEQ ID NO: 5654 - DNA, 31 bp, Artificial Sequence
  Description of Artificial Sequence:  Enzymatic Nucleic Acid
gggccccgggctagctacaacgagggaaggg

SEQ ID NO: 5655 - DNA, 31 bp, Artificial Sequence
  Description of Artificial Sequence:  Enzymatic Nucleic Acid
gtaaagggggctagctacaacgacccgtggg

SEQ ID NO: 5656 - DNA, 31 bp, Artificial Sequence
  Description of Artificial Sequence:  Enzymatic Nucleic Acid
cggcgcagggctagctacaacgaaaagggcc

SEQ ID NO: 5657 - DNA, 31 bp, Artificial Sequence
  Description of Artificial Sequence:  Enzymatic Nucleic Acid
gcgcggcgggctagctacaacgaagtaaagg

SEQ ID NO: 5658 - DNA, 31 bp, Artificial Sequence
  Description of Artificial Sequence:  Enzymatic Nucleic Acid
gcgcgcggggctagctacaacgagcagtaaa

SEQ ID NO: 5659 - DNA, 31 bp, Artificial Sequence
  Description of Artificial Sequence:  Enzymatic Nucleic Acid
cgggcgcgggctagctacaacgaggcgcagt

SEQ ID NO: 5660 - DNA, 31 bp, Artificial Sequence
  Description of Artificial Sequence:  Enzymatic Nucleic Acid
gccgggcgggctagctacaacgagcggcgca

SEQ ID NO: 5661 - DNA, 31 bp, Artificial Sequence
  Description of Artificial Sequence:  Enzymatic Nucleic Acid
gggccgggggctagctacaacgagcgcggcg

SEQ ID NO: 5662 - DNA, 31 bp, Artificial Sequence
  Description of Artificial Sequence:  Enzymatic Nucleic Acid
ggtgggggggctagctacaacgacgggcgcg

SEQ ID NO: 5663 - DNA, 31 bp, Artificial Sequence
  Description of Artificial Sequence:  Enzymatic Nucleic Acid
gcgaggggggctagctacaacgagggggccg

SEQ ID NO: 5664 - DNA, 31 bp, Artificial Sequence
  Description of Artificial Sequence:  Enzymatic Nucleic Acid
gggtgctgggctagctacaacgagaggggtg

SEQ ID NO: 5665 - DNA, 31 bp, Artificial Sequence
  Description of Artificial Sequence:  Enzymatic Nucleic Acid
gcggggtgggctagctacaacgatgcgaggg

SEQ ID NO: 5666 - DNA, 31 bp, Artificial Sequence
  Description of Artificial Sequence:  Enzymatic Nucleic Acid
gcgcggggggctagctacaacgagctgcgag

SEQ ID NO: 5667 - DNA, 31 bp, Artificial Sequence
  Description of Artificial Sequence:  Enzymatic Nucleic Acid
gcggggcgggctagctacaacgaggggtgct

SEQ ID NO: 5668 - DNA, 31 bp, Artificial Sequence
  Description of Artificial Sequence:  Enzymatic Nucleic Acid
gcgcggggggctagctacaacgagcggggtg

SEQ ID NO: 5669 - DNA, 31 bp, Artificial Sequence
  Description of Artificial Sequence:  Enzymatic Nucleic Acid
ggagggcgggctagctacaacgaggggcgcg

SEQ ID NO: 5670 - DNA, 31 bp, Artificial Sequence
  Description of Artificial Sequence:  Enzymatic Nucleic Acid
tgggagggggctagctacaacgagcggggcg

SEQ ID NO: 5671 - DNA, 31 bp, Artificial Sequence
  Description of Artificial Sequence:  Enzymatic Nucleic Acid
ggacccggggctagctacaacgatgggaggg

SEQ ID NO: 5672 - DNA, 31 bp, Artificial Sequence
  Description of Artificial Sequence:  Enzymatic Nucleic Acid
cggctggaggctagctacaacgaccggctgg

SEQ ID NO: 5673 - DNA, 31 bp, Artificial Sequence
  Description of Artificial Sequence:  Enzymatic Nucleic Acid
ggctccggggctagctacaacgatggacccg

SEQ ID NO: 5674 - DNA, 31 bp, Artificial Sequence
  Description of Artificial Sequence:  Enzymatic Nucleic Acid
ccccatggggctagctacaacgatccggctg

SEQ ID NO: 5675 - DNA, 31 bp, Artificial Sequence
  Description of Artificial Sequence:  Enzymatic Nucleic Acid
cggccccaggctagctacaacgaggctccgg

SEQ ID NO: 5676 - DNA, 31 bp, Artificial Sequence
  Description of Artificial Sequence:  Enzymatic Nucleic Acid
ggctccggggctagctacaacgacccatggc

SEQ ID NO: 5677 - DNA, 31 bp, Artificial Sequence
  Description of Artificial Sequence:  Enzymatic Nucleic Acid
cactgcggggctagctacaacgatccggccc

SEQ ID NO: 5678 - DNA, 31 bp, Artificial Sequence
  Description of Artificial Sequence:  Enzymatic Nucleic Acid
gctcactgggctagctacaacgaggctccgg

SEQ ID NO: 5679 - DNA, 31 bp, Artificial Sequence
  Description of Artificial Sequence:  Enzymatic Nucleic Acid
ggtgctcaggctagctacaacgatgcggctc

SEQ ID NO: 5680 - DNA, 31 bp, Artificial Sequence
  Description of Artificial Sequence:  Enzymatic Nucleic Acid
ccatggtgggctagctacaacgatcactgcg

SEQ ID NO: 5681 - DNA, 31 bp, Artificial Sequence
  Description of Artificial Sequence:  Enzymatic Nucleic Acid
ctccatggggctagctacaacgagctcactg

SEQ ID NO: 5682 - DNA, 31 bp, Artificial Sequence
  Description of Artificial Sequence:  Enzymatic Nucleic Acid
cagctccaggctagctacaacgaggtgctca

SEQ ID NO: 5683 - DNA, 31 bp, Artificial Sequence
  Description of Artificial Sequence:  Enzymatic Nucleic Acid
gccgccagggctagctacaacgatccatggt

SEQ ID NO: 5684 - DNA, 31 bp, Artificial Sequence
  Description of Artificial Sequence:  Enzymatic Nucleic Acid
caaggccgggctagctacaacgacagctcca

SEQ ID NO: 5685 - DNA, 31 bp, Artificial Sequence
  Description of Artificial Sequence:  Enzymatic Nucleic Acid
gcacaaggggctagctacaacgacgccagct

SEQ ID NO: 5686 - DNA, 31 bp, Artificial Sequence
  Description of Artificial Sequence:  Enzymatic Nucleic Acid
cagcggcaggctagctacaacgaaaggccgc

SEQ ID NO: 5687 - DNA, 31 bp, Artificial Sequence
  Description of Artificial Sequence:  Enzymatic Nucleic Acid
cccagcggggctagctacaacgaacaaggcc

SEQ ID NO: 5688 - DNA, 31 bp, Artificial Sequence
  Description of Artificial Sequence:  Enzymatic Nucleic Acid
gcccccagggctagctacaacgaggcacaag

SEQ ID NO: 5689 - DNA, 31 bp, Artificial Sequence
  Description of Artificial Sequence:  Enzymatic Nucleic Acid
aggaggagggctagctacaacgaccccagcg

SEQ ID NO: 5690 - DNA, 31 bp, Artificial Sequence
  Description of Artificial Sequence:  Enzymatic Nucleic Acid
caagagggggctagctacaacgagaggagga

SEQ ID NO: 5691 - DNA, 31 bp, Artificial Sequence
  Description of Artificial Sequence:  Enzymatic Nucleic Acid
ccggggggggctagctacaacgaaagagggc

SEQ ID NO: 5692 - DNA, 31 bp, Artificial Sequence
  Description of Artificial Sequence:  Enzymatic Nucleic Acid
gctcgcggggctagctacaacgatccggggg

SEQ ID NO: 5693 - DNA, 31 bp, Artificial Sequence
  Description of Artificial Sequence:  Enzymatic Nucleic Acid
ggtgctcgggctagctacaacgaggctccgg

SEQ ID NO: 5694 - DNA, 31 bp, Artificial Sequence
  Description of Artificial Sequence:  Enzymatic Nucleic Acid
cttgggtgggctagctacaacgatcgcggct

SEQ ID NO: 5695 - DNA, 31 bp, Artificial Sequence
  Description of Artificial Sequence:  Enzymatic Nucleic Acid
cacttgggggctagctacaacgagctcgcgg

SEQ ID NO: 5696 - DNA, 31 bp, Artificial Sequence
  Description of Artificial Sequence:  Enzymatic Nucleic Acid
ggtgcacaggctagctacaacgattgggtgc

SEQ ID NO: 5697 - DNA, 31 bp, Artificial Sequence
  Description of Artificial Sequence:  Enzymatic Nucleic Acid
ccggtgcaggctagctacaacgaacttgggt

SEQ ID NO: 5698 - DNA, 31 bp, Artificial Sequence
  Description of Artificial Sequence:  Enzymatic Nucleic Acid
tgccggtgggctagctacaacgaacacttgg

SEQ ID NO: 5699 - DNA, 31 bp, Artificial Sequence
  Description of Artificial Sequence:  Enzymatic Nucleic Acid
tgtgccggggctagctacaacgagcacactt

SEQ ID NO: 5700 - DNA, 31 bp, Artificial Sequence
  Description of Artificial Sequence:  Enzymatic Nucleic Acid
tgtctgtgggctagctacaacgacggtgcac

SEQ ID NO: 5701 - DNA, 31 bp, Artificial Sequence
  Description of Artificial Sequence:  Enzymatic Nucleic Acid
catgtctgggctagctacaacgagccggtgc

SEQ ID NO: 5702 - DNA, 31 bp, Artificial Sequence
  Description of Artificial Sequence:  Enzymatic Nucleic Acid
gcttcatgggctagctacaacgactgtgccg

SEQ ID NO: 5703 - DNA, 31 bp, Artificial Sequence
  Description of Artificial Sequence:  Enzymatic Nucleic Acid
cagcttcaggctagctacaacgagtctgtgc

SEQ ID NO: 5704 - DNA, 31 bp, Artificial Sequence
  Description of Artificial Sequence:  Enzymatic Nucleic Acid
agccgcagggctagctacaacgattcatgtc

SEQ ID NO: 5705 - DNA, 31 bp, Artificial Sequence
  Description of Artificial Sequence:  Enzymatic Nucleic Acid
gggagccgggctagctacaacgaagcttcat

SEQ ID NO: 5706 - DNA, 31 bp, Artificial Sequence
  Description of Artificial Sequence:  Enzymatic Nucleic Acid
gcagggagggctagctacaacgacgcagctt

SEQ ID NO: 5707 - DNA, 31 bp, Artificial Sequence
  Description of Artificial Sequence:  Enzymatic Nucleic Acid
gggactggggctagctacaacgaagggagcc

SEQ ID NO: 5708 - DNA, 31 bp, Artificial Sequence
  Description of Artificial Sequence:  Enzymatic Nucleic Acid
tctcgggaggctagctacaacgatggcaggg

SEQ ID NO: 5709 - DNA, 31 bp, Artificial Sequence
  Description of Artificial Sequence:  Enzymatic Nucleic Acid
caggtgggggctagctacaacgactcgggac

SEQ ID NO: 5710 - DNA, 31 bp, Artificial Sequence
  Description of Artificial Sequence:  Enzymatic Nucleic Acid
tgtccaggggctagctacaacgagggtctcg

SEQ ID NO: 5711 - DNA, 31 bp, Artificial Sequence
  Description of Artificial Sequence:  Enzymatic Nucleic Acid
ggagcatgggctagctacaacgaccaggtgg

SEQ ID NO: 5712 - DNA, 31 bp, Artificial Sequence
  Description of Artificial Sequence:  Enzymatic Nucleic Acid
gcggagcaggctagctacaacgagtccaggt

SEQ ID NO: 5713 - DNA, 31 bp, Artificial Sequence
  Description of Artificial Sequence:  Enzymatic Nucleic Acid
tggcggagggctagctacaacgaatgtccag

SEQ ID NO: 5714 - DNA, 31 bp, Artificial Sequence
  Description of Artificial Sequence:  Enzymatic Nucleic Acid
agaggtggggctagctacaacgaggagcatg

SEQ ID NO: 5715 - DNA, 31 bp, Artificial Sequence
  Description of Artificial Sequence:  Enzymatic Nucleic Acid
ggtagaggggctagctacaacgaggcggagc

SEQ ID NO: 5716 - DNA, 31 bp, Artificial Sequence
  Description of Artificial Sequence:  Enzymatic Nucleic Acid
agccctggggctagctacaacgaagaggtgg

SEQ ID NO: 5717 - DNA, 31 bp, Artificial Sequence
  Description of Artificial Sequence:  Enzymatic Nucleic Acid
cctggcagggctagctacaacgacctggtag

SEQ ID NO: 5718 - DNA, 31 bp, Artificial Sequence
  Description of Artificial Sequence:  Enzymatic Nucleic Acid
ccacctggggctagctacaacgaagccctgg

SEQ ID NO: 5719 - DNA, 31 bp, Artificial Sequence
  Description of Artificial Sequence:  Enzymatic Nucleic Acid
ctgcaccaggctagctacaacgactggcagc

SEQ ID NO: 5720 - DNA, 31 bp, Artificial Sequence
  Description of Artificial Sequence:  Enzymatic Nucleic Acid
tccctgcaggctagctacaacgacacctggc

SEQ ID NO: 5721 - DNA, 31 bp, Artificial Sequence
  Description of Artificial Sequence:  Enzymatic Nucleic Acid
tttccctgggctagctacaacgaaccacctg

SEQ ID NO: 5722 - DNA, 31 bp, Artificial Sequence
  Description of Artificial Sequence:  Enzymatic Nucleic Acid
gttccaggggctagctacaacgattccctgc

SEQ ID NO: 5723 - DNA, 31 bp, Artificial Sequence
  Description of Artificial Sequence:  Enzymatic Nucleic Acid
taggtgagggctagctacaacgatccaggtt

SEQ ID NO: 5724 - DNA, 31 bp, Artificial Sequence
  Description of Artificial Sequence:  Enzymatic Nucleic Acid
caggtaggggctagctacaacgagagttcca

SEQ ID NO: 5725 - DNA, 31 bp, Artificial Sequence
  Description of Artificial Sequence:  Enzymatic Nucleic Acid
tgggcaggggctagctacaacgaaggtgagt

SEQ ID NO: 5726 - DNA, 31 bp, Artificial Sequence
  Description of Artificial Sequence:  Enzymatic Nucleic Acid
ttggtgggggctagctacaacgaaggtaggt

SEQ ID NO: 5727 - DNA, 31 bp, Artificial Sequence
  Description of Artificial Sequence:  Enzymatic Nucleic Acid
ggcattggggctagctacaacgagggcaggt

SEQ ID NO: 5728 - DNA, 31 bp, Artificial Sequence
  Description of Artificial Sequence:  Enzymatic Nucleic Acid
ggctggcaggctagctacaacgatggtgggc

SEQ ID NO: 5729 - DNA, 31 bp, Artificial Sequence
  Description of Artificial Sequence:  Enzymatic Nucleic Acid
caggctggggctagctacaacgaattggtgg

SEQ ID NO: 5730 - DNA, 31 bp, Artificial Sequence
  Description of Artificial Sequence:  Enzymatic Nucleic Acid
aggacaggggctagctacaacgatggcattg

SEQ ID NO: 5731 - DNA, 31 bp, Artificial Sequence
  Description of Artificial Sequence:  Enzymatic Nucleic Acid
aggaaggaggctagctacaacgaaggctggc

SEQ ID NO: 5732 - DNA, 31 bp, Artificial Sequence
  Description of Artificial Sequence:  Enzymatic Nucleic Acid
atatcctgggctagctacaacgaaggaagga

SEQ ID NO: 5733 - DNA, 31 bp, Artificial Sequence
  Description of Artificial Sequence:  Enzymatic Nucleic Acid
cctggataggctagctacaacgacctgcagg

SEQ ID NO: 5734 - DNA, 31 bp, Artificial Sequence
  Description of Artificial Sequence:  Enzymatic Nucleic Acid
ctcctggaggctagctacaacgaatcctgca

SEQ ID NO: 5735 - DNA, 31 bp, Artificial Sequence
  Description of Artificial Sequence:  Enzymatic Nucleic Acid
gccctgcaggctagctacaacgactcctgga

SEQ ID NO: 5736 - DNA, 31 bp, Artificial Sequence
  Description of Artificial Sequence:  Enzymatic Nucleic Acid
tagccctgggctagctacaacgaacctcctg

SEQ ID NO: 5737 - DNA, 31 bp, Artificial Sequence
  Description of Artificial Sequence:  Enzymatic Nucleic Acid
gcacgtagggctagctacaacgacctgcacc

SEQ ID NO: 5738 - DNA, 31 bp, Artificial Sequence
  Description of Artificial Sequence:  Enzymatic Nucleic Acid
tgagcacgggctagctacaacgaagccctgc

SEQ ID NO: 5739 - DNA, 31 bp, Artificial Sequence
  Description of Artificial Sequence:  Enzymatic Nucleic Acid
gatgagcaggctagctacaacgagtagccct

SEQ ID NO: 5740 - DNA, 31 bp, Artificial Sequence
  Description of Artificial Sequence:  Enzymatic Nucleic Acid
gcgatgagggctagctacaacgaacgtagcc

SEQ ID NO: 5741 - DNA, 31 bp, Artificial Sequence
  Description of Artificial Sequence:  Enzymatic Nucleic Acid
gtgagcgaggctagctacaacgagagcacgt

SEQ ID NO: 5742 - DNA, 31 bp, Artificial Sequence
  Description of Artificial Sequence:  Enzymatic Nucleic Acid
gttgtgagggctagctacaacgagatgagca

SEQ ID NO: 5743 - DNA, 31 bp, Artificial Sequence
  Description of Artificial Sequence:  Enzymatic Nucleic Acid
cttggttgggctagctacaacgagagcgatg

SEQ ID NO: 5744 - DNA, 31 bp, Artificial Sequence
  Description of Artificial Sequence:  Enzymatic Nucleic Acid
tcacttggggctagctacaacgatgtgagcg

SEQ ID NO: 5745 - DNA, 31 bp, Artificial Sequence
  Description of Artificial Sequence:  Enzymatic Nucleic Acid
ctgcctcaggctagctacaacgattggttgt

SEQ ID NO: 5746 - DNA, 31 bp, Artificial Sequence
  Description of Artificial Sequence:  Enzymatic Nucleic Acid
gggacctgggctagctacaacgactcacttg

SEQ ID NO: 5747 - DNA, 31 bp, Artificial Sequence
  Description of Artificial Sequence:  Enzymatic Nucleic Acid
cagtgggaggctagctacaacgactgcctca

SEQ ID NO: 5748 - DNA, 31 bp, Artificial Sequence
  Description of Artificial Sequence:  Enzymatic Nucleic Acid
ctctgcagggctagctacaacgagggacctg

SEQ ID NO: 5749 - DNA, 31 bp, Artificial Sequence
  Description of Artificial Sequence:  Enzymatic Nucleic Acid
agcctctgggctagctacaacgaagtgggac

SEQ ID NO: 5750 - DNA, 31 bp, Artificial Sequence
  Description of Artificial Sequence:  Enzymatic Nucleic Acid
atccgcagggctagctacaacgactctgcag

SEQ ID NO: 5751 - DNA, 31 bp, Artificial Sequence
  Description of Artificial Sequence:  Enzymatic Nucleic Acid
acaatccgggctagctacaacgaagcctctg

SEQ ID NO: 5752 - DNA, 31 bp, Artificial Sequence
  Description of Artificial Sequence:  Enzymatic Nucleic Acid
tcgcacaaggctagctacaacgaccgcagcc

SEQ ID NO: 5753 - DNA, 31 bp, Artificial Sequence
  Description of Artificial Sequence:  Enzymatic Nucleic Acid
gcctcgcaggctagctacaacgaaatccgca

SEQ ID NO: 5754 - DNA, 31 bp, Artificial Sequence
  Description of Artificial Sequence:  Enzymatic Nucleic Acid
gtgcctcgggctagctacaacgaacaatccg

SEQ ID NO: 5755 - DNA, 31 bp, Artificial Sequence
  Description of Artificial Sequence:  Enzymatic Nucleic Acid
gctgggtgggctagctacaacgactcgcaca

SEQ ID NO: 5756 - DNA, 31 bp, Artificial Sequence
  Description of Artificial Sequence:  Enzymatic Nucleic Acid
gagctgggggctagctacaacgagcctcgca

SEQ ID NO: 5757 - DNA, 31 bp, Artificial Sequence
  Description of Artificial Sequence:  Enzymatic Nucleic Acid
tcaaagagggctagctacaacgatgggtgcc

SEQ ID NO: 5758 - DNA, 31 bp, Artificial Sequence
  Description of Artificial Sequence:  Enzymatic Nucleic Acid
catagttgggctagctacaacgacctcaaag

SEQ ID NO: 5759 - DNA, 31 bp, Artificial Sequence
  Description of Artificial Sequence:  Enzymatic Nucleic Acid
gggcatagggctagctacaacgatgtcctca

SEQ ID NO: 5760 - DNA, 31 bp, Artificial Sequence
  Description of Artificial Sequence:  Enzymatic Nucleic Acid
ccagggcaggctagctacaacgaagttgtcc

SEQ ID NO: 5761 - DNA, 31 bp, Artificial Sequence
  Description of Artificial Sequence:  Enzymatic Nucleic Acid
ggccagggggctagctacaacgaatagttgt

SEQ ID NO: 5762 - DNA, 31 bp, Artificial Sequence
  Description of Artificial Sequence:  Enzymatic Nucleic Acid
tagcacggggctagctacaacgacagggcat

SEQ ID NO: 5763 - DNA, 31 bp, Artificial Sequence
  Description of Artificial Sequence:  Enzymatic Nucleic Acid
gtctagcaggctagctacaacgaggccaggg

SEQ ID NO: 5764 - DNA, 31 bp, Artificial Sequence
  Description of Artificial Sequence:  Enzymatic Nucleic Acid
ttgtctagggctagctacaacgaacggccag

SEQ ID NO: 5765 - DNA, 31 bp, Artificial Sequence
  Description of Artificial Sequence:  Enzymatic Nucleic Acid
ctccattgggctagctacaacgactagcacg

SEQ ID NO: 5766 - DNA, 31 bp, Artificial Sequence
  Description of Artificial Sequence:  Enzymatic Nucleic Acid
ggtctccaggctagctacaacgatgtctagc

SEQ ID NO: 5767 - DNA, 31 bp, Artificial Sequence
  Description of Artificial Sequence:  Enzymatic Nucleic Acid
tcagcgggggctagctacaacgactccattg

SEQ ID NO: 5768 - DNA, 31 bp, Artificial Sequence
  Description of Artificial Sequence:  Enzymatic Nucleic Acid
ttgttcagggctagctacaacgagggtctcc

SEQ ID NO: 5769 - DNA, 31 bp, Artificial Sequence
  Description of Artificial Sequence:  Enzymatic Nucleic Acid
tggtattgggctagctacaacgatcagcggg

SEQ ID NO: 5770 - DNA, 31 bp, Artificial Sequence
  Description of Artificial Sequence:  Enzymatic Nucleic Acid
gggtggtaggctagctacaacgatgttcagc

SEQ ID NO: 5771 - DNA, 31 bp, Artificial Sequence
  Description of Artificial Sequence:  Enzymatic Nucleic Acid
aggggtggggctagctacaacgaattgttca

SEQ ID NO: 5772 - DNA, 31 bp, Artificial Sequence
  Description of Artificial Sequence:  Enzymatic Nucleic Acid
gacaggggggctagctacaacgaggtattgt

SEQ ID NO: 5773 - DNA, 31 bp, Artificial Sequence
  Description of Artificial Sequence:  Enzymatic Nucleic Acid
ccctgtgaggctagctacaacgaaggggtgg

SEQ ID NO: 5774 - DNA, 31 bp, Artificial Sequence
  Description of Artificial Sequence:  Enzymatic Nucleic Acid
ggcccctgggctagctacaacgagacagggg

SEQ ID NO: 5775 - DNA, 31 bp, Artificial Sequence
  Description of Artificial Sequence:  Enzymatic Nucleic Acid
tggggaggggctagctacaacgaccctgtga

SEQ ID NO: 5776 - DNA, 31 bp, Artificial Sequence
  Description of Artificial Sequence:  Enzymatic Nucleic Acid
cccgcaggggctagctacaacgactcctggg

SEQ ID NO: 5777 - DNA, 31 bp, Artificial Sequence
  Description of Artificial Sequence:  Enzymatic Nucleic Acid
agctcccgggctagctacaacgaaggcctcc

SEQ ID NO: 5778 - DNA, 31 bp, Artificial Sequence
  Description of Artificial Sequence:  Enzymatic Nucleic Acid
agctgcagggctagctacaacgatcccgcag

SEQ ID NO: 5779 - DNA, 31 bp, Artificial Sequence
  Description of Artificial Sequence:  Enzymatic Nucleic Acid
cgaagctgggctagctacaacgaagctcccg

SEQ ID NO: 5780 - DNA, 31 bp, Artificial Sequence
  Description of Artificial Sequence:  Enzymatic Nucleic Acid
cttcgaagggctagctacaacgatgcagctc

SEQ ID NO: 5781 - DNA, 31 bp, Artificial Sequence
  Description of Artificial Sequence:  Enzymatic Nucleic Acid
ctgtgaggggctagctacaacgattcgaagc

SEQ ID NO: 5782 - DNA, 31 bp, Artificial Sequence
  Description of Artificial Sequence:  Enzymatic Nucleic Acid
gatctctgggctagctacaacgagaggcttc

SEQ ID NO: 5783 - DNA, 31 bp, Artificial Sequence
  Description of Artificial Sequence:  Enzymatic Nucleic Acid
tttcaagaggctagctacaacgactctgtga

SEQ ID NO: 5784 - DNA, 31 bp, Artificial Sequence
  Description of Artificial Sequence:  Enzymatic Nucleic Acid
gatcaagaggctagctacaacgaccctcctt

SEQ ID NO: 5785 - DNA, 31 bp, Artificial Sequence
  Description of Artificial Sequence:  Enzymatic Nucleic Acid
ccgctggaggctagctacaacgacaagaccc

SEQ ID NO: 5786 - DNA, 31 bp, Artificial Sequence
  Description of Artificial Sequence:  Enzymatic Nucleic Acid
gggttccgggctagctacaacgatggatcaa

SEQ ID NO: 5787 - DNA, 31 bp, Artificial Sequence
  Description of Artificial Sequence:  Enzymatic Nucleic Acid
gctgggggggctagctacaacgatccgctgg

SEQ ID NO: 5788 - DNA, 31 bp, Artificial Sequence
  Description of Artificial Sequence:  Enzymatic Nucleic Acid
tagcagagggctagctacaacgatgggggtt

SEQ ID NO: 5789 - DNA, 31 bp, Artificial Sequence
  Description of Artificial Sequence:  Enzymatic Nucleic Acid
cctggtagggctagctacaacgaagagctgg

SEQ ID NO: 5790 - DNA, 31 bp, Artificial Sequence
  Description of Artificial Sequence:  Enzymatic Nucleic Acid
tgtcctggggctagctacaacgaagcagagc

SEQ ID NO: 5791 - DNA, 31 bp, Artificial Sequence
  Description of Artificial Sequence:  Enzymatic Nucleic Acid
aaatcgtgggctagctacaacgacctggtag

SEQ ID NO: 5792 - DNA, 31 bp, Artificial Sequence
  Description of Artificial Sequence:  Enzymatic Nucleic Acid
caaaatcgggctagctacaacgagtcctggt

SEQ ID NO: 5793 - DNA, 31 bp, Artificial Sequence
  Description of Artificial Sequence:  Enzymatic Nucleic Acid
ccacaaaaggctagctacaacgacgtgtcct

SEQ ID NO: 5794 - DNA, 31 bp, Artificial Sequence
  Description of Artificial Sequence:  Enzymatic Nucleic Acid
tccttccaggctagctacaacgaaaaatcgt

SEQ ID NO: 5795 - DNA, 31 bp, Artificial Sequence
  Description of Artificial Sequence:  Enzymatic Nucleic Acid
ggaagatgggctagctacaacgaccttccac

SEQ ID NO: 5796 - DNA, 31 bp, Artificial Sequence
  Description of Artificial Sequence:  Enzymatic Nucleic Acid
gtggaagaggctagctacaacgagtccttcc

SEQ ID NO: 5797 - DNA, 31 bp, Artificial Sequence
  Description of Artificial Sequence:  Enzymatic Nucleic Acid
tgttcttgggctagctacaacgaggaagatg

SEQ ID NO: 5798 - DNA, 31 bp, Artificial Sequence
  Description of Artificial Sequence:  Enzymatic Nucleic Acid
gctggttgggctagctacaacgatcttgtgg

SEQ ID NO: 5799 - DNA, 31 bp, Artificial Sequence
  Description of Artificial Sequence:  Enzymatic Nucleic Acid
ccagctggggctagctacaacgatgttcttg

SEQ ID NO: 5800 - DNA, 31 bp, Artificial Sequence
  Description of Artificial Sequence:  Enzymatic Nucleic Acid
agagccagggctagctacaacgatggttgtt

SEQ ID NO: 5801 - DNA, 31 bp, Artificial Sequence
  Description of Artificial Sequence:  Enzymatic Nucleic Acid
tgtgagagggctagctacaacgacagctggt

SEQ ID NO: 5802 - DNA, 31 bp, Artificial Sequence
  Description of Artificial Sequence:  Enzymatic Nucleic Acid
tatcagtgggctagctacaacgagagagcca

SEQ ID NO: 5803 - DNA, 31 bp, Artificial Sequence
  Description of Artificial Sequence:  Enzymatic Nucleic Acid
tctatcagggctagctacaacgagtgagagc

SEQ ID NO: 5804 - DNA, 31 bp, Artificial Sequence
  Description of Artificial Sequence:  Enzymatic Nucleic Acid
ggtgtctaggctagctacaacgacagtgtga

SEQ ID NO: 5805 - DNA, 31 bp, Artificial Sequence
  Description of Artificial Sequence:  Enzymatic Nucleic Acid
ggttggtgggctagctacaacgactatcagt

SEQ ID NO: 5806 - DNA, 31 bp, Artificial Sequence
  Description of Artificial Sequence:  Enzymatic Nucleic Acid
gcggttggggctagctacaacgagtctatca

SEQ ID NO: 5807 - DNA, 31 bp, Artificial Sequence
  Description of Artificial Sequence:  Enzymatic Nucleic Acid
gagagcggggctagctacaacgatggtgtct

SEQ ID NO: 5808 - DNA, 31 bp, Artificial Sequence
  Description of Artificial Sequence:  Enzymatic Nucleic Acid
cccgagagggctagctacaacgaggttggtg

SEQ ID NO: 5809 - DNA, 31 bp, Artificial Sequence
  Description of Artificial Sequence:  Enzymatic Nucleic Acid
gtggcaggggctagctacaacgaccgagagc

SEQ ID NO: 5810 - DNA, 31 bp, Artificial Sequence
  Description of Artificial Sequence:  Enzymatic Nucleic Acid
aggggtggggctagctacaacgaaggcccga

SEQ ID NO: 5811 - DNA, 31 bp, Artificial Sequence
  Description of Artificial Sequence:  Enzymatic Nucleic Acid
aacaggggggctagctacaacgaggcaggcc

SEQ ID NO: 5812 - DNA, 31 bp, Artificial Sequence
  Description of Artificial Sequence:  Enzymatic Nucleic Acid
tcggagaaggctagctacaacgaaggggtgg

SEQ ID NO: 5813 - DNA, 31 bp, Artificial Sequence
  Description of Artificial Sequence:  Enzymatic Nucleic Acid
cttacacaggctagctacaacgacggagaac

SEQ ID NO: 5814 - DNA, 31 bp, Artificial Sequence
  Description of Artificial Sequence:  Enzymatic Nucleic Acid
cccttacaggctagctacaacgaatcggaga

SEQ ID NO: 5815 - DNA, 31 bp, Artificial Sequence
  Description of Artificial Sequence:  Enzymatic Nucleic Acid
agcccttaggctagctacaacgaacatcgga

SEQ ID NO: 5816 - DNA, 31 bp, Artificial Sequence
  Description of Artificial Sequence:  Enzymatic Nucleic Acid
agcgggagggctagctacaacgaccttacac

SEQ ID NO: 5817 - DNA, 31 bp, Artificial Sequence
  Description of Artificial Sequence:  Enzymatic Nucleic Acid
cccagcagggctagctacaacgagggagccc

SEQ ID NO: 5818 - DNA, 31 bp, Artificial Sequence
  Description of Artificial Sequence:  Enzymatic Nucleic Acid
ctccccagggctagctacaacgaagcgggag

SEQ ID NO: 5819 - DNA, 31 bp, Artificial Sequence
  Description of Artificial Sequence:  Enzymatic Nucleic Acid
cctcagaaggctagctacaacgatctctccc

SEQ ID NO: 5820 - DNA, 31 bp, Artificial Sequence
  Description of Artificial Sequence:  Enzymatic Nucleic Acid
tctgacaaggctagctacaacgacctcagaa

SEQ ID NO: 5821 - DNA, 31 bp, Artificial Sequence
  Description of Artificial Sequence:  Enzymatic Nucleic Acid
ggctctgaggctagctacaacgaaatcctca

SEQ ID NO: 5822 - DNA, 31 bp, Artificial Sequence
  Description of Artificial Sequence:  Enzymatic Nucleic Acid
gcgtcaggggctagctacaacgatctgacaa

SEQ ID NO: 5823 - DNA, 31 bp, Artificial Sequence
  Description of Artificial Sequence:  Enzymatic Nucleic Acid
agtgcgcgggctagctacaacgacaggctct

SEQ ID NO: 5824 - DNA, 31 bp, Artificial Sequence
  Description of Artificial Sequence:  Enzymatic Nucleic Acid
acagtgcgggctagctacaacgagtcaggct

SEQ ID NO: 5825 - DNA, 31 bp, Artificial Sequence
  Description of Artificial Sequence:  Enzymatic Nucleic Acid
agacagtgggctagctacaacgagcgtcagg

SEQ ID NO: 5826 - DNA, 31 bp, Artificial Sequence
  Description of Artificial Sequence:  Enzymatic Nucleic Acid
acagacagggctagctacaacgagcgcgtca

SEQ ID NO: 5827 - DNA, 31 bp, Artificial Sequence
  Description of Artificial Sequence:  Enzymatic Nucleic Acid
ggcacagaggctagctacaacgaagtgcgcg

SEQ ID NO: 5828 - DNA, 31 bp, Artificial Sequence
  Description of Artificial Sequence:  Enzymatic Nucleic Acid
caccggcaggctagctacaacgaagacagtg

SEQ ID NO: 5829 - DNA, 31 bp, Artificial Sequence
  Description of Artificial Sequence:  Enzymatic Nucleic Acid
gccaccggggctagctacaacgaacagacag

SEQ ID NO: 5830 - DNA, 31 bp, Artificial Sequence
  Description of Artificial Sequence:  Enzymatic Nucleic Acid
cacagccaggctagctacaacgacggcacag

SEQ ID NO: 5831 - DNA, 31 bp, Artificial Sequence
  Description of Artificial Sequence:  Enzymatic Nucleic Acid
gggcacagggctagctacaacgacaccggca

SEQ ID NO: 5832 - DNA, 31 bp, Artificial Sequence
  Description of Artificial Sequence:  Enzymatic Nucleic Acid
agcgggcaggctagctacaacgaagccaccg

SEQ ID NO: 5833 - DNA, 31 bp, Artificial Sequence
  Description of Artificial Sequence:  Enzymatic Nucleic Acid
gcagcgggggctagctacaacgaacagccac

SEQ ID NO: 5834 - DNA, 31 bp, Artificial Sequence
  Description of Artificial Sequence:  Enzymatic Nucleic Acid
ccttgcagggctagctacaacgagggcacag

SEQ ID NO: 5835 - DNA, 31 bp, Artificial Sequence
  Description of Artificial Sequence:  Enzymatic Nucleic Acid
gccccttgggctagctacaacgaagcgggca

SEQ ID NO: 5836 - DNA, 31 bp, Artificial Sequence
  Description of Artificial Sequence:  Enzymatic Nucleic Acid
ggcagtggggctagctacaacgacccttgca

SEQ ID NO: 5837 - DNA, 31 bp, Artificial Sequence
  Description of Artificial Sequence:  Enzymatic Nucleic Acid
gtgggcagggctagctacaacgaggcccctt

SEQ ID NO: 5838 - DNA, 31 bp, Artificial Sequence
  Description of Artificial Sequence:  Enzymatic Nucleic Acid
tcagtgggggctagctacaacgaagtggccc

SEQ ID NO: 5839 - DNA, 31 bp, Artificial Sequence
  Description of Artificial Sequence:  Enzymatic Nucleic Acid
gcagtcagggctagctacaacgagggcagtg

SEQ ID NO: 5840 - DNA, 31 bp, Artificial Sequence
  Description of Artificial Sequence:  Enzymatic Nucleic Acid
ggcagcagggctagctacaacgacagtgggc

SEQ ID NO: 5841 - DNA, 31 bp, Artificial Sequence
  Description of Artificial Sequence:  Enzymatic Nucleic Acid
catggcagggctagctacaacgaagtcagtg

SEQ ID NO: 5842 - DNA, 31 bp, Artificial Sequence
  Description of Artificial Sequence:  Enzymatic Nucleic Acid
gctcatggggctagctacaacgaagcagtca

SEQ ID NO: 5843 - DNA, 31 bp, Artificial Sequence
  Description of Artificial Sequence:  Enzymatic Nucleic Acid
actgctcaggctagctacaacgaggcagcag

SEQ ID NO: 5844 - DNA, 31 bp, Artificial Sequence
  Description of Artificial Sequence:  Enzymatic Nucleic Acid
gcacactgggctagctacaacgatcatggca

SEQ ID NO: 5845 - DNA, 31 bp, Artificial Sequence
  Description of Artificial Sequence:  Enzymatic Nucleic Acid
gcagcacaggctagctacaacgatgctcatg

SEQ ID NO: 5846 - DNA, 31 bp, Artificial Sequence
  Description of Artificial Sequence:  Enzymatic Nucleic Acid
cggcagcaggctagctacaacgaactgctca

SEQ ID NO: 5847 - DNA, 31 bp, Artificial Sequence
  Description of Artificial Sequence:  Enzymatic Nucleic Acid
gccggcagggctagctacaacgaacactgct

SEQ ID NO: 5848 - DNA, 31 bp, Artificial Sequence
  Description of Artificial Sequence:  Enzymatic Nucleic Acid
gcagccggggctagctacaacgaagcacact

SEQ ID NO: 5849 - DNA, 31 bp, Artificial Sequence
  Description of Artificial Sequence:  Enzymatic Nucleic Acid
ccgtgcagggctagctacaacgacggcagca

SEQ ID NO: 5850 - DNA, 31 bp, Artificial Sequence
  Description of Artificial Sequence:  Enzymatic Nucleic Acid
ggcccgtgggctagctacaacgaagccggca

SEQ ID NO: 5851 - DNA, 31 bp, Artificial Sequence
  Description of Artificial Sequence:  Enzymatic Nucleic Acid
ggggcccgggctagctacaacgagcagccgg

SEQ ID NO: 5852 - DNA, 31 bp, Artificial Sequence
  Description of Artificial Sequence:  Enzymatic Nucleic Acid
gcttggggggctagctacaacgaccgtgcag

SEQ ID NO: 5853 - DNA, 31 bp, Artificial Sequence
  Description of Artificial Sequence:  Enzymatic Nucleic Acid
tcagagtgggctagctacaacgattggggcc

SEQ ID NO: 5854 - DNA, 31 bp, Artificial Sequence
  Description of Artificial Sequence:  Enzymatic Nucleic Acid
agtcagagggctagctacaacgagcttgggg

SEQ ID NO: 5855 - DNA, 31 bp, Artificial Sequence
  Description of Artificial Sequence:  Enzymatic Nucleic Acid
ccaggcagggctagctacaacgacagagtgc

SEQ ID NO: 5856 - DNA, 31 bp, Artificial Sequence
  Description of Artificial Sequence:  Enzymatic Nucleic Acid
aggccaggggctagctacaacgaagtcagag

SEQ ID NO: 5857 - DNA, 31 bp, Artificial Sequence
  Description of Artificial Sequence:  Enzymatic Nucleic Acid
gaggcaggggctagctacaacgacaggcagt

SEQ ID NO: 5858 - DNA, 31 bp, Artificial Sequence
  Description of Artificial Sequence:  Enzymatic Nucleic Acid
agtggaggggctagctacaacgaaggccagg

SEQ ID NO: 5859 - DNA, 31 bp, Artificial Sequence
  Description of Artificial Sequence:  Enzymatic Nucleic Acid
ggttgaagggctagctacaacgaggaggcag

SEQ ID NO: 5860 - DNA, 31 bp, Artificial Sequence
  Description of Artificial Sequence:  Enzymatic Nucleic Acid
cactgtggggctagctacaacgatgaagtgg

SEQ ID NO: 5861 - DNA, 31 bp, Artificial Sequence
  Description of Artificial Sequence:  Enzymatic Nucleic Acid
tgccactgggctagctacaacgaggttgaag

SEQ ID NO: 5862 - DNA, 31 bp, Artificial Sequence
  Description of Artificial Sequence:  Enzymatic Nucleic Acid
agatgccaggctagctacaacgatgtggttg

SEQ ID NO: 5863 - DNA, 31 bp, Artificial Sequence
  Description of Artificial Sequence:  Enzymatic Nucleic Acid
cacagatgggctagctacaacgacactgtgg

SEQ ID NO: 5864 - DNA, 31 bp, Artificial Sequence
  Description of Artificial Sequence:  Enzymatic Nucleic Acid
ctcacagaggctagctacaacgagccactgt

SEQ ID NO: 5865 - DNA, 31 bp, Artificial Sequence
  Description of Artificial Sequence:  Enzymatic Nucleic Acid
gcagctcaggctagctacaacgaagatgcca

SEQ ID NO: 5866 - DNA, 31 bp, Artificial Sequence
  Description of Artificial Sequence:  Enzymatic Nucleic Acid
cagtgcagggctagctacaacgatcacagat

SEQ ID NO: 5867 - DNA, 31 bp, Artificial Sequence
  Description of Artificial Sequence:  Enzymatic Nucleic Acid
gggcagtgggctagctacaacgaagctcaca

SEQ ID NO: 5868 - DNA, 31 bp, Artificial Sequence
  Description of Artificial Sequence:  Enzymatic Nucleic Acid
ctgggcagggctagctacaacgagcagctca

SEQ ID NO: 5869 - DNA, 31 bp, Artificial Sequence
  Description of Artificial Sequence:  Enzymatic Nucleic Acid
gggctgggggctagctacaacgaagtgcagc

SEQ ID NO: 5870 - DNA, 31 bp, Artificial Sequence
  Description of Artificial Sequence:  Enzymatic Nucleic Acid
gaccagggggctagctacaacgatgggcagt

SEQ ID NO: 5871 - DNA, 31 bp, Artificial Sequence
  Description of Artificial Sequence:  Enzymatic Nucleic Acid
gtaggtgaggctagctacaacgacagggctg

SEQ ID NO: 5872 - DNA, 31 bp, Artificial Sequence
  Description of Artificial Sequence:  Enzymatic Nucleic Acid
gttgtaggggctagctacaacgagaccaggg

SEQ ID NO: 5873 - DNA, 31 bp, Artificial Sequence
  Description of Artificial Sequence:  Enzymatic Nucleic Acid
ctgtgttgggctagctacaacgaaggtgacc

SEQ ID NO: 5874 - DNA, 31 bp, Artificial Sequence
  Description of Artificial Sequence:  Enzymatic Nucleic Acid
tgtctgtgggctagctacaacgatgtaggtg

SEQ ID NO: 5875 - DNA, 31 bp, Artificial Sequence
  Description of Artificial Sequence:  Enzymatic Nucleic Acid
cgtgtctgggctagctacaacgagttgtagg

SEQ ID NO: 5876 - DNA, 31 bp, Artificial Sequence
  Description of Artificial Sequence:  Enzymatic Nucleic Acid
caaacgtgggctagctacaacgactgtgttg

SEQ ID NO: 5877 - DNA, 31 bp, Artificial Sequence
  Description of Artificial Sequence:  Enzymatic Nucleic Acid
ctcaaacgggctagctacaacgagtctgtgt

SEQ ID NO: 5878 - DNA, 31 bp, Artificial Sequence
  Description of Artificial Sequence:  Enzymatic Nucleic Acid
gactcaaaggctagctacaacgagtgtctgt

SEQ ID NO: 5879 - DNA, 31 bp, Artificial Sequence
  Description of Artificial Sequence:  Enzymatic Nucleic Acid
ggcatggaggctagctacaacgatcaaacgt

SEQ ID NO: 5880 - DNA, 31 bp, Artificial Sequence
  Description of Artificial Sequence:  Enzymatic Nucleic Acid
attgggcaggctagctacaacgaggactcaa

SEQ ID NO: 5881 - DNA, 31 bp, Artificial Sequence
  Description of Artificial Sequence:  Enzymatic Nucleic Acid
ggattgggggctagctacaacgaatggactc

SEQ ID NO: 5882 - DNA, 31 bp, Artificial Sequence
  Description of Artificial Sequence:  Enzymatic Nucleic Acid
cctcgggaggctagctacaacgatgggcatg

SEQ ID NO: 5883 - DNA, 31 bp, Artificial Sequence
  Description of Artificial Sequence:  Enzymatic Nucleic Acid
tataccggggctagctacaacgacctcggga

SEQ ID NO: 5884 - DNA, 31 bp, Artificial Sequence
  Description of Artificial Sequence:  Enzymatic Nucleic Acid
aatgtataggctagctacaacgacggccctc

SEQ ID NO: 5885 - DNA, 31 bp, Artificial Sequence
  Description of Artificial Sequence:  Enzymatic Nucleic Acid
cgaatgtaggctagctacaacgaaccggccc

SEQ ID NO: 5886 - DNA, 31 bp, Artificial Sequence
  Description of Artificial Sequence:  Enzymatic Nucleic Acid
gccgaatgggctagctacaacgaataccggc

SEQ ID NO: 5887 - DNA, 31 bp, Artificial Sequence
  Description of Artificial Sequence:  Enzymatic Nucleic Acid
gcgccgaaggctagctacaacgagtataccg

SEQ ID NO: 5888 - DNA, 31 bp, Artificial Sequence
  Description of Artificial Sequence:  Enzymatic Nucleic Acid
agctggcgggctagctacaacgacgaatgta

SEQ ID NO: 5889 - DNA, 31 bp, Artificial Sequence
  Description of Artificial Sequence:  Enzymatic Nucleic Acid
acagctggggctagctacaacgagccgaatg

SEQ ID NO: 5890 - DNA, 31 bp, Artificial Sequence
  Description of Artificial Sequence:  Enzymatic Nucleic Acid
tcacacagggctagctacaacgatggcgccg

SEQ ID NO: 5891 - DNA, 31 bp, Artificial Sequence
  Description of Artificial Sequence:  Enzymatic Nucleic Acid
cagtcacaggctagctacaacgaagctggcg

SEQ ID NO: 5892 - DNA, 31 bp, Artificial Sequence
  Description of Artificial Sequence:  Enzymatic Nucleic Acid
ggcagtcaggctagctacaacgaacagctgg

SEQ ID NO: 5893 - DNA, 31 bp, Artificial Sequence
  Description of Artificial Sequence:  Enzymatic Nucleic Acid
acaggcagggctagctacaacgacacacagc

SEQ ID NO: 5894 - DNA, 31 bp, Artificial Sequence
  Description of Artificial Sequence:  Enzymatic Nucleic Acid
gggacaggggctagctacaacgaagtcacac

SEQ ID NO: 5895 - DNA, 31 bp, Artificial Sequence
  Description of Artificial Sequence:  Enzymatic Nucleic Acid
tgtagggaggctagctacaacgaaggcagtc

SEQ ID NO: 5896 - DNA, 31 bp, Artificial Sequence
  Description of Artificial Sequence:  Enzymatic Nucleic Acid
ggtagttgggctagctacaacgaagggacag

SEQ ID NO: 5897 - DNA, 31 bp, Artificial Sequence
  Description of Artificial Sequence:  Enzymatic Nucleic Acid
aaaggtagggctagctacaacgatgtaggga

SEQ ID NO: 5898 - DNA, 31 bp, Artificial Sequence
  Description of Artificial Sequence:  Enzymatic Nucleic Acid
tagaaaggggctagctacaacgaagttgtag

SEQ ID NO: 5899 - DNA, 31 bp, Artificial Sequence
  Description of Artificial Sequence:  Enzymatic Nucleic Acid
cacgtccgggctagctacaacgaagaaaggt

SEQ ID NO: 5900 - DNA, 31 bp, Artificial Sequence
  Description of Artificial Sequence:  Enzymatic Nucleic Acid
atcccacgggctagctacaacgaccgtagaa

SEQ ID NO: 5901 - DNA, 31 bp, Artificial Sequence
  Description of Artificial Sequence:  Enzymatic Nucleic Acid
ggatcccaggctagctacaacgagtccgtag

SEQ ID NO: 5902 - DNA, 31 bp, Artificial Sequence
  Description of Artificial Sequence:  Enzymatic Nucleic Acid
gtgcaggaggctagctacaacgacccacgtc

SEQ ID NO: 5903 - DNA, 31 bp, Artificial Sequence
  Description of Artificial Sequence:  Enzymatic Nucleic Acid
cgagggtgggctagctacaacgaaggatccc

SEQ ID NO: 5904 - DNA, 31 bp, Artificial Sequence
  Description of Artificial Sequence:  Enzymatic Nucleic Acid
gacgagggggctagctacaacgagcaggatc

SEQ ID NO: 5905 - DNA, 31 bp, Artificial Sequence
  Description of Artificial Sequence:  Enzymatic Nucleic Acid
ggggcagaggctagctacaacgagagggtgc

SEQ ID NO: 5906 - DNA, 31 bp, Artificial Sequence
  Description of Artificial Sequence:  Enzymatic Nucleic Acid
gcagggggggctagctacaacgaagacgagg

SEQ ID NO: 5907 - DNA, 31 bp, Artificial Sequence
  Description of Artificial Sequence:  Enzymatic Nucleic Acid
tggttgtgggctagctacaacgaagggggca

SEQ ID NO: 5908 - DNA, 31 bp, Artificial Sequence
  Description of Artificial Sequence:  Enzymatic Nucleic Acid
cttggttgggctagctacaacgagcaggggg

SEQ ID NO: 5909 - DNA, 31 bp, Artificial Sequence
  Description of Artificial Sequence:  Enzymatic Nucleic Acid
cctcttggggctagctacaacgatgtgcagg

SEQ ID NO: 5910 - DNA, 31 bp, Artificial Sequence
  Description of Artificial Sequence:  Enzymatic Nucleic Acid
tgctgtcaggctagctacaacgactcttggt

SEQ ID NO: 5911 - DNA, 31 bp, Artificial Sequence
  Description of Artificial Sequence:  Enzymatic Nucleic Acid
ctctgctgggctagctacaacgacacctctt

SEQ ID NO: 5912 - DNA, 31 bp, Artificial Sequence
  Description of Artificial Sequence:  Enzymatic Nucleic Acid
atcctctgggctagctacaacgatgtcacct

SEQ ID NO: 5913 - DNA, 31 bp, Artificial Sequence
  Description of Artificial Sequence:  Enzymatic Nucleic Acid
gtgttccaggctagctacaacgacctctgct

SEQ ID NO: 5914 - DNA, 31 bp, Artificial Sequence
  Description of Artificial Sequence:  Enzymatic Nucleic Acid
ccgctgtgggctagctacaacgatccatcct

SEQ ID NO: 5915 - DNA, 31 bp, Artificial Sequence
  Description of Artificial Sequence:  Enzymatic Nucleic Acid
caccgctgggctagctacaacgagttccatc

SEQ ID NO: 5916 - DNA, 31 bp, Artificial Sequence
  Description of Artificial Sequence:  Enzymatic Nucleic Acid
tcacaccgggctagctacaacgatgtgttcc

SEQ ID NO: 5917 - DNA, 31 bp, Artificial Sequence
  Description of Artificial Sequence:  Enzymatic Nucleic Acid
ttctcacaggctagctacaacgacgctgtgt

SEQ ID NO: 5918 - DNA, 31 bp, Artificial Sequence
  Description of Artificial Sequence:  Enzymatic Nucleic Acid
acttctcaggctagctacaacgaaccgctgt

SEQ ID NO: 5919 - DNA, 31 bp, Artificial Sequence
  Description of Artificial Sequence:  Enzymatic Nucleic Acid
ttgctgcaggctagctacaacgattctcaca

SEQ ID NO: 5920 - DNA, 31 bp, Artificial Sequence
  Description of Artificial Sequence:  Enzymatic Nucleic Acid
gcttgctgggctagctacaacgaacttctca

SEQ ID NO: 5921 - DNA, 31 bp, Artificial Sequence
  Description of Artificial Sequence:  Enzymatic Nucleic Acid
agggcttgggctagctacaacgatgcacttc

SEQ ID NO: 5922 - DNA, 31 bp, Artificial Sequence
  Description of Artificial Sequence:  Enzymatic Nucleic Acid
gcacagggggctagctacaacgattgctgca

SEQ ID NO: 5923 - DNA, 31 bp, Artificial Sequence
  Description of Artificial Sequence:  Enzymatic Nucleic Acid
ctcgggcaggctagctacaacgaagggcttg

SEQ ID NO: 5924 - DNA, 31 bp, Artificial Sequence
  Description of Artificial Sequence:  Enzymatic Nucleic Acid
cactcgggggctagctacaacgaacagggct

SEQ ID NO: 5925 - DNA, 31 bp, Artificial Sequence
  Description of Artificial Sequence:  Enzymatic Nucleic Acid
atagcacaggctagctacaacgatcgggcac

SEQ ID NO: 5926 - DNA, 31 bp, Artificial Sequence
  Description of Artificial Sequence:  Enzymatic Nucleic Acid
ccatagcaggctagctacaacgaactcgggc

SEQ ID NO: 5927 - DNA, 31 bp, Artificial Sequence
  Description of Artificial Sequence:  Enzymatic Nucleic Acid
gaccatagggctagctacaacgaacactcgg

SEQ ID NO: 5928 - DNA, 31 bp, Artificial Sequence
  Description of Artificial Sequence:  Enzymatic Nucleic Acid
ccagaccaggctagctacaacgaagcacact

SEQ ID NO: 5929 - DNA, 31 bp, Artificial Sequence
  Description of Artificial Sequence:  Enzymatic Nucleic Acid
tgcccagaggctagctacaacgacatagcac

SEQ ID NO: 5930 - DNA, 31 bp, Artificial Sequence
  Description of Artificial Sequence:  Enzymatic Nucleic Acid
gctccatgggctagctacaacgaccagacca

SEQ ID NO: 5931 - DNA, 31 bp, Artificial Sequence
  Description of Artificial Sequence:  Enzymatic Nucleic Acid
gtgctccaggctagctacaacgagcccagac

SEQ ID NO: 5932 - DNA, 31 bp, Artificial Sequence
  Description of Artificial Sequence:  Enzymatic Nucleic Acid
cgcaagtgggctagctacaacgatccatgcc

SEQ ID NO: 5933 - DNA, 31 bp, Artificial Sequence
  Description of Artificial Sequence:  Enzymatic Nucleic Acid
ctcgcaagggctagctacaacgagctccatg

SEQ ID NO: 5934 - DNA, 31 bp, Artificial Sequence
  Description of Artificial Sequence:  Enzymatic Nucleic Acid
acctctcgggctagctacaacgaaagtgctc

SEQ ID NO: 5935 - DNA, 31 bp, Artificial Sequence
  Description of Artificial Sequence:  Enzymatic Nucleic Acid
tgccctcaggctagctacaacgactctcgca

SEQ ID NO: 5936 - DNA, 31 bp, Artificial Sequence
  Description of Artificial Sequence:  Enzymatic Nucleic Acid
ggtaactgggctagctacaacgacctcacct

SEQ ID NO: 5937 - DNA, 31 bp, Artificial Sequence
  Description of Artificial Sequence:  Enzymatic Nucleic Acid
actggtaaggctagctacaacgatgccctca

SEQ ID NO: 5938 - DNA, 31 bp, Artificial Sequence
  Description of Artificial Sequence:  Enzymatic Nucleic Acid
ggcactggggctagctacaacgaaactgccc

SEQ ID NO: 5939 - DNA, 31 bp, Artificial Sequence
  Description of Artificial Sequence:  Enzymatic Nucleic Acid
tattggcaggctagctacaacgatggtaact

SEQ ID NO: 5940 - DNA, 31 bp, Artificial Sequence
  Description of Artificial Sequence:  Enzymatic Nucleic Acid
gatattggggctagctacaacgaactggtaa

SEQ ID NO: 5941 - DNA, 31 bp, Artificial Sequence
  Description of Artificial Sequence:  Enzymatic Nucleic Acid
cctggataggctagctacaacgatggcactg

SEQ ID NO: 5942 - DNA, 31 bp, Artificial Sequence
  Description of Artificial Sequence:  Enzymatic Nucleic Acid
ctcctggaggctagctacaacgaattggcac

SEQ ID NO: 5943 - DNA, 31 bp, Artificial Sequence
  Description of Artificial Sequence:  Enzymatic Nucleic Acid
ccagcaaaggctagctacaacgatcctggat

SEQ ID NO: 5944 - DNA, 31 bp, Artificial Sequence
  Description of Artificial Sequence:  Enzymatic Nucleic Acid
gcagccagggctagctacaacgaaaactcct

SEQ ID NO: 5945 - DNA, 31 bp, Artificial Sequence
  Description of Artificial Sequence:  Enzymatic Nucleic Acid
tcttgcagggctagctacaacgacagcaaac

SEQ ID NO: 5946 - DNA, 31 bp, Artificial Sequence
  Description of Artificial Sequence:  Enzymatic Nucleic Acid
tcttcttgggctagctacaacgaagccagca

SEQ ID NO: 5947 - DNA, 31 bp, Artificial Sequence
  Description of Artificial Sequence:  Enzymatic Nucleic Acid
cccaaagaggctagctacaacgacttcttgc

SEQ ID NO: 5948 - DNA, 31 bp, Artificial Sequence
  Description of Artificial Sequence:  Enzymatic Nucleic Acid
atgccaggggctagctacaacgatcccaaag

SEQ ID NO: 5949 - DNA, 31 bp, Artificial Sequence
  Description of Artificial Sequence:  Enzymatic Nucleic Acid
cagaaatgggctagctacaacgacaggctcc

SEQ ID NO: 5950 - DNA, 31 bp, Artificial Sequence
  Description of Artificial Sequence:  Enzymatic Nucleic Acid
ggcagaaaggctagctacaacgagccaggct

SEQ ID NO: 5951 - DNA, 31 bp, Artificial Sequence
  Description of Artificial Sequence:  Enzymatic Nucleic Acid
ctctccggggctagctacaacgaagaaatgc

SEQ ID NO: 5952 - DNA, 31 bp, Artificial Sequence
  Description of Artificial Sequence:  Enzymatic Nucleic Acid
catcaaagggctagctacaacgatctccggc

SEQ ID NO: 5953 - DNA, 31 bp, Artificial Sequence
  Description of Artificial Sequence:  Enzymatic Nucleic Acid
ggtccccaggctagctacaacgacaaagctc

SEQ ID NO: 5954 - DNA, 31 bp, Artificial Sequence
  Description of Artificial Sequence:  Enzymatic Nucleic Acid
aggctgggggctagctacaacgaccccatca

SEQ ID NO: 5955 - DNA, 31 bp, Artificial Sequence
  Description of Artificial Sequence:  Enzymatic Nucleic Acid
gttggaggggctagctacaacgatgggtccc

SEQ ID NO: 5956 - DNA, 31 bp, Artificial Sequence
  Description of Artificial Sequence:  Enzymatic Nucleic Acid
gggcagtgggctagctacaacgatggaggct

SEQ ID NO: 5957 - DNA, 31 bp, Artificial Sequence
  Description of Artificial Sequence:  Enzymatic Nucleic Acid
cggggcagggctagctacaacgagttggagg

SEQ ID NO: 5958 - DNA, 31 bp, Artificial Sequence
  Description of Artificial Sequence:  Enzymatic Nucleic Acid
gagcggggggctagctacaacgaagtgttgg

SEQ ID NO: 5959 - DNA, 31 bp, Artificial Sequence
  Description of Artificial Sequence:  Enzymatic Nucleic Acid
ggctggagggctagctacaacgaggggcagt

SEQ ID NO: 5960 - DNA, 31 bp, Artificial Sequence
  Description of Artificial Sequence:  Enzymatic Nucleic Acid
tgctctggggctagctacaacgatggagcgg

SEQ ID NO: 5961 - DNA, 31 bp, Artificial Sequence
  Description of Artificial Sequence:  Enzymatic Nucleic Acid
tggagctgggctagctacaacgatctggctg

SEQ ID NO: 5962 - DNA, 31 bp, Artificial Sequence
  Description of Artificial Sequence:  Enzymatic Nucleic Acid
acttggagggctagctacaacgatgctctgg

SEQ ID NO: 5963 - DNA, 31 bp, Artificial Sequence
  Description of Artificial Sequence:  Enzymatic Nucleic Acid
ctcaaacaggctagctacaacgattggagct

SEQ ID NO: 5964 - DNA, 31 bp, Artificial Sequence
  Description of Artificial Sequence:  Enzymatic Nucleic Acid
gtctcaaaggctagctacaacgaacttggag

SEQ ID NO: 5965 - DNA, 31 bp, Artificial Sequence
  Description of Artificial Sequence:  Enzymatic Nucleic Acid
ttccagagggctagctacaacgactcaaaca

SEQ ID NO: 5966 - DNA, 31 bp, Artificial Sequence
  Description of Artificial Sequence:  Enzymatic Nucleic Acid
acctgtgaggctagctacaacgactcttcca

SEQ ID NO: 5967 - DNA, 31 bp, Artificial Sequence
  Description of Artificial Sequence:  Enzymatic Nucleic Acid
gtaacctgggctagctacaacgagatctctt

SEQ ID NO: 5968 - DNA, 31 bp, Artificial Sequence
  Description of Artificial Sequence:  Enzymatic Nucleic Acid
ataggtaaggctagctacaacgactgtgatc

SEQ ID NO: 5969 - DNA, 31 bp, Artificial Sequence
  Description of Artificial Sequence:  Enzymatic Nucleic Acid
tgtataggggctagctacaacgaaacctgtg

SEQ ID NO: 5970 - DNA, 31 bp, Artificial Sequence
  Description of Artificial Sequence:  Enzymatic Nucleic Acid
gagatgtaggctagctacaacgaaggtaacc

SEQ ID NO: 5971 - DNA, 31 bp, Artificial Sequence
  Description of Artificial Sequence:  Enzymatic Nucleic Acid
ctgagatgggctagctacaacgaataggtaa

SEQ ID NO: 5972 - DNA, 31 bp, Artificial Sequence
  Description of Artificial Sequence:  Enzymatic Nucleic Acid
tgctgagaggctagctacaacgagtataggt

SEQ ID NO: 5973 - DNA, 31 bp, Artificial Sequence
  Description of Artificial Sequence:  Enzymatic Nucleic Acid
cggccatgggctagctacaacgatgagatgt

SEQ ID NO: 5974 - DNA, 31 bp, Artificial Sequence
  Description of Artificial Sequence:  Enzymatic Nucleic Acid
tccggccaggctagctacaacgagctgagat

SEQ ID NO: 5975 - DNA, 31 bp, Artificial Sequence
  Description of Artificial Sequence:  Enzymatic Nucleic Acid
ctgtccggggctagctacaacgacatgctga

SEQ ID NO: 5976 - DNA, 31 bp, Artificial Sequence
  Description of Artificial Sequence:  Enzymatic Nucleic Acid
gcaggctgggctagctacaacgaccggccat

SEQ ID NO: 5977 - DNA, 31 bp, Artificial Sequence
  Description of Artificial Sequence:  Enzymatic Nucleic Acid
caggcaggggctagctacaacgatgtccggc

SEQ ID NO: 5978 - DNA, 31 bp, Artificial Sequence
  Description of Artificial Sequence:  Enzymatic Nucleic Acid
aggtcaggggctagctacaacgaaggctgtc

SEQ ID NO: 5979 - DNA, 31 bp, Artificial Sequence
  Description of Artificial Sequence:  Enzymatic Nucleic Acid
cgctgaggggctagctacaacgacaggcagg

SEQ ID NO: 5980 - DNA, 31 bp, Artificial Sequence
  Description of Artificial Sequence:  Enzymatic Nucleic Acid
ggaagacgggctagctacaacgatgaggtca

SEQ ID NO: 5981 - DNA, 31 bp, Artificial Sequence
  Description of Artificial Sequence:  Enzymatic Nucleic Acid
ctggaagaggctagctacaacgagctgaggt

SEQ ID NO: 5982 - DNA, 31 bp, Artificial Sequence
  Description of Artificial Sequence:  Enzymatic Nucleic Acid
cttgcaggggctagctacaacgatctggaag

SEQ ID NO: 5983 - DNA, 31 bp, Artificial Sequence
  Description of Artificial Sequence:  Enzymatic Nucleic Acid
attacttgggctagctacaacgaaggttctg

SEQ ID NO: 5984 - DNA, 31 bp, Artificial Sequence
  Description of Artificial Sequence:  Enzymatic Nucleic Acid
ccggattaggctagctacaacgattgcaggt

SEQ ID NO: 5985 - DNA, 31 bp, Artificial Sequence
  Description of Artificial Sequence:  Enzymatic Nucleic Acid
tccccggaggctagctacaacgatacttgca

SEQ ID NO: 5986 - DNA, 31 bp, Artificial Sequence
  Description of Artificial Sequence:  Enzymatic Nucleic Acid
agaattcgggctagctacaacgaccccggat

SEQ ID NO: 5987 - DNA, 31 bp, Artificial Sequence
  Description of Artificial Sequence:  Enzymatic Nucleic Acid
gtgcagaaggctagctacaacgatcgtcccc

SEQ ID NO: 5988 - DNA, 31 bp, Artificial Sequence
  Description of Artificial Sequence:  Enzymatic Nucleic Acid
ccattgtgggctagctacaacgaagaattcg

SEQ ID NO: 5989 - DNA, 31 bp, Artificial Sequence
  Description of Artificial Sequence:  Enzymatic Nucleic Acid
cgccattgggctagctacaacgagcagaatt

SEQ ID NO: 5990 - DNA, 31 bp, Artificial Sequence
  Description of Artificial Sequence:  Enzymatic Nucleic Acid
aggcgccaggctagctacaacgatgtgcaga

SEQ ID NO: 5991 - DNA, 31 bp, Artificial Sequence
  Description of Artificial Sequence:  Enzymatic Nucleic Acid
agtaggcgggctagctacaacgacattgtgc

SEQ ID NO: 5992 - DNA, 31 bp, Artificial Sequence
  Description of Artificial Sequence:  Enzymatic Nucleic Acid
cgagtaggggctagctacaacgagccattgt

SEQ ID NO: 5993 - DNA, 31 bp, Artificial Sequence
  Description of Artificial Sequence:  Enzymatic Nucleic Acid
tcagcgagggctagctacaacgaaggcgcca

SEQ ID NO: 5994 - DNA, 31 bp, Artificial Sequence
  Description of Artificial Sequence:  Enzymatic Nucleic Acid
agggtcagggctagctacaacgagagtaggc

SEQ ID NO: 5995 - DNA, 31 bp, Artificial Sequence
  Description of Artificial Sequence:  Enzymatic Nucleic Acid
ttgcagggggctagctacaacgacagcgagt

SEQ ID NO: 5996 - DNA, 31 bp, Artificial Sequence
  Description of Artificial Sequence:  Enzymatic Nucleic Acid
agcccttgggctagctacaacgaagggtcag

SEQ ID NO: 5997 - DNA, 31 bp, Artificial Sequence
  Description of Artificial Sequence:  Enzymatic Nucleic Acid
atgcccagggctagctacaacgaccttgcag

SEQ ID NO: 5998 - DNA, 31 bp, Artificial Sequence
  Description of Artificial Sequence:  Enzymatic Nucleic Acid
agctgatgggctagctacaacgaccagccct

SEQ ID NO: 5999 - DNA, 31 bp, Artificial Sequence
  Description of Artificial Sequence:  Enzymatic Nucleic Acid
ccagctgaggctagctacaacgagcccagcc

SEQ ID NO: 6000 - DNA, 31 bp, Artificial Sequence
  Description of Artificial Sequence:  Enzymatic Nucleic Acid
ccagccagggctagctacaacgatgatgccc

SEQ ID NO: 6001 - DNA, 31 bp, Artificial Sequence
  Description of Artificial Sequence:  Enzymatic Nucleic Acid
agccccagggctagctacaacgacagctgat

SEQ ID NO: 6002 - DNA, 31 bp, Artificial Sequence
  Description of Artificial Sequence:  Enzymatic Nucleic Acid
gagcgcagggctagctacaacgacccagcca

SEQ ID NO: 6003 - DNA, 31 bp, Artificial Sequence
  Description of Artificial Sequence:  Enzymatic Nucleic Acid
agtgagcgggctagctacaacgaagccccag

SEQ ID NO: 6004 - DNA, 31 bp, Artificial Sequence
  Description of Artificial Sequence:  Enzymatic Nucleic Acid
tcagtgagggctagctacaacgagcagcccc

SEQ ID NO: 6005 - DNA, 31 bp, Artificial Sequence
  Description of Artificial Sequence:  Enzymatic Nucleic Acid
tccctcagggctagctacaacgagagcgcag

SEQ ID NO: 6006 - DNA, 31 bp, Artificial Sequence
  Description of Artificial Sequence:  Enzymatic Nucleic Acid
ctgcccagggctagctacaacgatccctcag

SEQ ID NO: 6007 - DNA, 31 bp, Artificial Sequence
  Description of Artificial Sequence:  Enzymatic Nucleic Acid
gtccactgggctagctacaacgaccagttcc

SEQ ID NO: 6008 - DNA, 31 bp, Artificial Sequence
  Description of Artificial Sequence:  Enzymatic Nucleic Acid
ccagtccaggctagctacaacgatgcccagt

SEQ ID NO: 6009 - DNA, 31 bp, Artificial Sequence
  Description of Artificial Sequence:  Enzymatic Nucleic Acid
agggccagggctagctacaacgaccactgcc

SEQ ID NO: 6010 - DNA, 31 bp, Artificial Sequence
  Description of Artificial Sequence:  Enzymatic Nucleic Acid
gatgagggggctagctacaacgacagtccac

SEQ ID NO: 6011 - DNA, 31 bp, Artificial Sequence
  Description of Artificial Sequence:  Enzymatic Nucleic Acid
atggtggaggctagctacaacgagagggcca

SEQ ID NO: 6012 - DNA, 31 bp, Artificial Sequence
  Description of Artificial Sequence:  Enzymatic Nucleic Acid
tgttatggggctagctacaacgaggatgagg

SEQ ID NO: 6013 - DNA, 31 bp, Artificial Sequence
  Description of Artificial Sequence:  Enzymatic Nucleic Acid
gggtgttaggctagctacaacgaggtggatg

SEQ ID NO: 6014 - DNA, 31 bp, Artificial Sequence
  Description of Artificial Sequence:  Enzymatic Nucleic Acid
ggtgggtgggctagctacaacgatatggtgg

SEQ ID NO: 6015 - DNA, 31 bp, Artificial Sequence
  Description of Artificial Sequence:  Enzymatic Nucleic Acid
gaggtgggggctagctacaacgagttatggt

SEQ ID NO: 6016 - DNA, 31 bp, Artificial Sequence
  Description of Artificial Sequence:  Enzymatic Nucleic Acid
agcagaggggctagctacaacgagggtgtta

SEQ ID NO: 6017 - DNA, 31 bp, Artificial Sequence
  Description of Artificial Sequence:  Enzymatic Nucleic Acid
gcacgaagggctagctacaacgaagaggtgg

SEQ ID NO: 6018 - DNA, 31 bp, Artificial Sequence
  Description of Artificial Sequence:  Enzymatic Nucleic Acid
cgtgtgcaggctagctacaacgagaagcaga

SEQ ID NO: 6019 - DNA, 31 bp, Artificial Sequence
  Description of Artificial Sequence:  Enzymatic Nucleic Acid
accgtgtgggctagctacaacgaacgaagca

SEQ ID NO: 6020 - DNA, 31 bp, Artificial Sequence
  Description of Artificial Sequence:  Enzymatic Nucleic Acid
gcaccgtgggctagctacaacgagcacgaag

SEQ ID NO: 6021 - DNA, 31 bp, Artificial Sequence
  Description of Artificial Sequence:  Enzymatic Nucleic Acid
gggcaccgggctagctacaacgagtgcacga

SEQ ID NO: 6022 - DNA, 31 bp, Artificial Sequence
  Description of Artificial Sequence:  Enzymatic Nucleic Acid
ccagggcaggctagctacaacgacgtgtgca

SEQ ID NO: 6023 - DNA, 31 bp, Artificial Sequence
  Description of Artificial Sequence:  Enzymatic Nucleic Acid
tcccagggggctagctacaacgaaccgtgtg

SEQ ID NO: 6024 - DNA, 31 bp, Artificial Sequence
  Description of Artificial Sequence:  Enzymatic Nucleic Acid
agagctggggctagctacaacgacccagggc

SEQ ID NO: 6025 - DNA, 31 bp, Artificial Sequence
  Description of Artificial Sequence:  Enzymatic Nucleic Acid
cgaaagagggctagctacaacgatggtccca

SEQ ID NO: 6026 - DNA, 31 bp, Artificial Sequence
  Description of Artificial Sequence:  Enzymatic Nucleic Acid
ggtgcgggggctagctacaacgatccgaaag

SEQ ID NO: 6027 - DNA, 31 bp, Artificial Sequence
  Description of Artificial Sequence:  Enzymatic Nucleic Acid
gcttggtgggctagctacaacgagggttccg

SEQ ID NO: 6028 - DNA, 31 bp, Artificial Sequence
  Description of Artificial Sequence:  Enzymatic Nucleic Acid
gagcttggggctagctacaacgagcgggttc

SEQ ID NO: 6029 - DNA, 31 bp, Artificial Sequence
  Description of Artificial Sequence:  Enzymatic Nucleic Acid
gagcagagggctagctacaacgattggtgcg

SEQ ID NO: 6030 - DNA, 31 bp, Artificial Sequence
  Description of Artificial Sequence:  Enzymatic Nucleic Acid
gtgtggagggctagctacaacgaagagcttg

SEQ ID NO: 6031 - DNA, 31 bp, Artificial Sequence
  Description of Artificial Sequence:  Enzymatic Nucleic Acid
tggcagtgggctagctacaacgaggagcaga

SEQ ID NO: 6032 - DNA, 31 bp, Artificial Sequence
  Description of Artificial Sequence:  Enzymatic Nucleic Acid
gttggcagggctagctacaacgagtggagca

SEQ ID NO: 6033 - DNA, 31 bp, Artificial Sequence
  Description of Artificial Sequence:  Enzymatic Nucleic Acid
ccggttggggctagctacaacgaagtgtgga

SEQ ID NO: 6034 - DNA, 31 bp, Artificial Sequence
  Description of Artificial Sequence:  Enzymatic Nucleic Acid
ctggccggggctagctacaacgatggcagtg

SEQ ID NO: 6035 - DNA, 31 bp, Artificial Sequence
  Description of Artificial Sequence:  Enzymatic Nucleic Acid
tcctctggggctagctacaacgacggttggc

SEQ ID NO: 6036 - DNA, 31 bp, Artificial Sequence
  Description of Artificial Sequence:  Enzymatic Nucleic Acid
cacactcgggctagctacaacgacctctggc

SEQ ID NO: 6037 - DNA, 31 bp, Artificial Sequence
  Description of Artificial Sequence:  Enzymatic Nucleic Acid
cccacacaggctagctacaacgatcgtcctc

SEQ ID NO: 6038 - DNA, 31 bp, Artificial Sequence
  Description of Artificial Sequence:  Enzymatic Nucleic Acid
cgcccacaggctagctacaacgaactcgtcc

SEQ ID NO: 6039 - DNA, 31 bp, Artificial Sequence
  Description of Artificial Sequence:  Enzymatic Nucleic Acid
ctcgcccaggctagctacaacgaacactcgt

SEQ ID NO: 6040 - DNA, 31 bp, Artificial Sequence
  Description of Artificial Sequence:  Enzymatic Nucleic Acid
ggccctcgggctagctacaacgaccacacac

SEQ ID NO: 6041 - DNA, 31 bp, Artificial Sequence
  Description of Artificial Sequence:  Enzymatic Nucleic Acid
aggccaggggctagctacaacgacctcgccc

SEQ ID NO: 6042 - DNA, 31 bp, Artificial Sequence
  Description of Artificial Sequence:  Enzymatic Nucleic Acid
gtggcaggggctagctacaacgacaggccct

SEQ ID NO: 6043 - DNA, 31 bp, Artificial Sequence
  Description of Artificial Sequence:  Enzymatic Nucleic Acid
gctggtggggctagctacaacgaaggccagg

SEQ ID NO: 6044 - DNA, 31 bp, Artificial Sequence
  Description of Artificial Sequence:  Enzymatic Nucleic Acid
acagctggggctagctacaacgaggcaggcc

SEQ ID NO: 6045 - DNA, 31 bp, Artificial Sequence
  Description of Artificial Sequence:  Enzymatic Nucleic Acid
gcgcacagggctagctacaacgatggtggca

SEQ ID NO: 6046 - DNA, 31 bp, Artificial Sequence
  Description of Artificial Sequence:  Enzymatic Nucleic Acid
cgggcgcaggctagctacaacgaagctggtg

SEQ ID NO: 6047 - DNA, 31 bp, Artificial Sequence
  Description of Artificial Sequence:  Enzymatic Nucleic Acid
ctcgggcgggctagctacaacgaacagctgg

SEQ ID NO: 6048 - DNA, 31 bp, Artificial Sequence
  Description of Artificial Sequence:  Enzymatic Nucleic Acid
ccctcgggggctagctacaacgagcacagct

SEQ ID NO: 6049 - DNA, 31 bp, Artificial Sequence
  Description of Artificial Sequence:  Enzymatic Nucleic Acid
cagcagtgggctagctacaacgacctcgggc

SEQ ID NO: 6050 - DNA, 31 bp, Artificial Sequence
  Description of Artificial Sequence:  Enzymatic Nucleic Acid
cccagcagggctagctacaacgagccctcgg

SEQ ID NO: 6051 - DNA, 31 bp, Artificial Sequence
  Description of Artificial Sequence:  Enzymatic Nucleic Acid
gaccccagggctagctacaacgaagtgccct

SEQ ID NO: 6052 - DNA, 31 bp, Artificial Sequence
  Description of Artificial Sequence:  Enzymatic Nucleic Acid
gccctggaggctagctacaacgacccagcag

SEQ ID NO: 6053 - DNA, 31 bp, Artificial Sequence
  Description of Artificial Sequence:  Enzymatic Nucleic Acid
tgggtgggggctagctacaacgacctggacc

SEQ ID NO: 6054 - DNA, 31 bp, Artificial Sequence
  Description of Artificial Sequence:  Enzymatic Nucleic Acid
acactgggggctagctacaacgagggccctg

SEQ ID NO: 6055 - DNA, 31 bp, Artificial Sequence
  Description of Artificial Sequence:  Enzymatic Nucleic Acid
ttgacacaggctagctacaacgatgggtggg

SEQ ID NO: 6056 - DNA, 31 bp, Artificial Sequence
  Description of Artificial Sequence:  Enzymatic Nucleic Acid
agttgacaggctagctacaacgaactgggtg

SEQ ID NO: 6057 - DNA, 31 bp, Artificial Sequence
  Description of Artificial Sequence:  Enzymatic Nucleic Acid
gcagttgaggctagctacaacgaacactggg

SEQ ID NO: 6058 - DNA, 31 bp, Artificial Sequence
  Description of Artificial Sequence:  Enzymatic Nucleic Acid
ggctgcagggctagctacaacgatgacacac

SEQ ID NO: 6059 - DNA, 31 bp, Artificial Sequence
  Description of Artificial Sequence:  Enzymatic Nucleic Acid
actggctgggctagctacaacgaagttgaca

SEQ ID NO: 6060 - DNA, 31 bp, Artificial Sequence
  Description of Artificial Sequence:  Enzymatic Nucleic Acid
ggaactggggctagctacaacgatgcagttg

SEQ ID NO: 6061 - DNA, 31 bp, Artificial Sequence
  Description of Artificial Sequence:  Enzymatic Nucleic Acid
cgaaggaaggctagctacaacgatggctgca

SEQ ID NO: 6062 - DNA, 31 bp, Artificial Sequence
  Description of Artificial Sequence:  Enzymatic Nucleic Acid
actcctggggctagctacaacgacccgaagg

SEQ ID NO: 6063 - DNA, 31 bp, Artificial Sequence
  Description of Artificial Sequence:  Enzymatic Nucleic Acid
tccacgcaggctagctacaacgatcctggcc

SEQ ID NO: 6064 - DNA, 31 bp, Artificial Sequence
  Description of Artificial Sequence:  Enzymatic Nucleic Acid
cctccacgggctagctacaacgaactcctgg

SEQ ID NO: 6065 - DNA, 31 bp, Artificial Sequence
  Description of Artificial Sequence:  Enzymatic Nucleic Acid
ttcctccaggctagctacaacgagcactcct

SEQ ID NO: 6066 - DNA, 31 bp, Artificial Sequence
  Description of Artificial Sequence:  Enzymatic Nucleic Acid
actcggcaggctagctacaacgatcctccac

SEQ ID NO: 6067 - DNA, 31 bp, Artificial Sequence
  Description of Artificial Sequence:  Enzymatic Nucleic Acid
gtactcggggctagctacaacgaattcctcc

SEQ ID NO: 6068 - DNA, 31 bp, Artificial Sequence
  Description of Artificial Sequence:  Enzymatic Nucleic Acid
ctgcagtaggctagctacaacgatcggcatt

SEQ ID NO: 6069 - DNA, 31 bp, Artificial Sequence
  Description of Artificial Sequence:  Enzymatic Nucleic Acid
ccctgcagggctagctacaacgaactcggca

SEQ ID NO: 6070 - DNA, 31 bp, Artificial Sequence
  Description of Artificial Sequence:  Enzymatic Nucleic Acid
agcccctgggctagctacaacgaagtactcg

SEQ ID NO: 6071 - DNA, 31 bp, Artificial Sequence
  Description of Artificial Sequence:  Enzymatic Nucleic Acid
ctggggagggctagctacaacgaccctgcag

SEQ ID NO: 6072 - DNA, 31 bp, Artificial Sequence
  Description of Artificial Sequence:  Enzymatic Nucleic Acid
ttcacataggctagctacaacgatccctggg

SEQ ID NO: 6073 - DNA, 31 bp, Artificial Sequence
  Description of Artificial Sequence:  Enzymatic Nucleic Acid
cattcacaggctagctacaacgaactccctg

SEQ ID NO: 6074 - DNA, 31 bp, Artificial Sequence
  Description of Artificial Sequence:  Enzymatic Nucleic Acid
ggcattcaggctagctacaacgaatactccc

SEQ ID NO: 6075 - DNA, 31 bp, Artificial Sequence
  Description of Artificial Sequence:  Enzymatic Nucleic Acid
gcctggcaggctagctacaacgatcacatac

SEQ ID NO: 6076 - DNA, 31 bp, Artificial Sequence
  Description of Artificial Sequence:  Enzymatic Nucleic Acid
gtgcctggggctagctacaacgaattcacat

SEQ ID NO: 6077 - DNA, 31 bp, Artificial Sequence
  Description of Artificial Sequence:  Enzymatic Nucleic Acid
aaacagtgggctagctacaacgactggcatt

SEQ ID NO: 6078 - DNA, 31 bp, Artificial Sequence
  Description of Artificial Sequence:  Enzymatic Nucleic Acid
gcaaacagggctagctacaacgagcctggca

SEQ ID NO: 6079 - DNA, 31 bp, Artificial Sequence
  Description of Artificial Sequence:  Enzymatic Nucleic Acid
acggcaaaggctagctacaacgaagtgcctg

SEQ ID NO: 6080 - DNA, 31 bp, Artificial Sequence
  Description of Artificial Sequence:  Enzymatic Nucleic Acid
tggcacggggctagctacaacgaaaacagtg

SEQ ID NO: 6081 - DNA, 31 bp, Artificial Sequence
  Description of Artificial Sequence:  Enzymatic Nucleic Acid
gggtggcaggctagctacaacgaggcaaaca

SEQ ID NO: 6082 - DNA, 31 bp, Artificial Sequence
  Description of Artificial Sequence:  Enzymatic Nucleic Acid
cagggtggggctagctacaacgaacggcaaa

SEQ ID NO: 6083 - DNA, 31 bp, Artificial Sequence
  Description of Artificial Sequence:  Enzymatic Nucleic Acid
actcagggggctagctacaacgaggcacggc

SEQ ID NO: 6084 - DNA, 31 bp, Artificial Sequence
  Description of Artificial Sequence:  Enzymatic Nucleic Acid
ggctgacaggctagctacaacgatcagggtg

SEQ ID NO: 6085 - DNA, 31 bp, Artificial Sequence
  Description of Artificial Sequence:  Enzymatic Nucleic Acid
ggggctgaggctagctacaacgaactcaggg

SEQ ID NO: 6086 - DNA, 31 bp, Artificial Sequence
  Description of Artificial Sequence:  Enzymatic Nucleic Acid
ttctggggggctagctacaacgatgacactc

SEQ ID NO: 6087 - DNA, 31 bp, Artificial Sequence
  Description of Artificial Sequence:  Enzymatic Nucleic Acid
ctgagccaggctagctacaacgatctggggc

SEQ ID NO: 6088 - DNA, 31 bp, Artificial Sequence
  Description of Artificial Sequence:  Enzymatic Nucleic Acid
tcactgagggctagctacaacgacattctgg

SEQ ID NO: 6089 - DNA, 31 bp, Artificial Sequence
  Description of Artificial Sequence:  Enzymatic Nucleic Acid
acaggtcaggctagctacaacgatgagccat

SEQ ID NO: 6090 - DNA, 31 bp, Artificial Sequence
  Description of Artificial Sequence:  Enzymatic Nucleic Acid
aaaacaggggctagctacaacgacactgagc

SEQ ID NO: 6091 - DNA, 31 bp, Artificial Sequence
  Description of Artificial Sequence:  Enzymatic Nucleic Acid
gtccaaaaggctagctacaacgaaggtcact

SEQ ID NO: 6092 - DNA, 31 bp, Artificial Sequence
  Description of Artificial Sequence:  Enzymatic Nucleic Acid
gcctccggggctagctacaacgaccaaaaca

SEQ ID NO: 6093 - DNA, 31 bp, Artificial Sequence
  Description of Artificial Sequence:  Enzymatic Nucleic Acid
ctggtcagggctagctacaacgactccggtc

SEQ ID NO: 6094 - DNA, 31 bp, Artificial Sequence
  Description of Artificial Sequence:  Enzymatic Nucleic Acid
cacactggggctagctacaacgacagcctcc

SEQ ID NO: 6095 - DNA, 31 bp, Artificial Sequence
  Description of Artificial Sequence:  Enzymatic Nucleic Acid
gccacacaggctagctacaacgatggtcagc

SEQ ID NO: 6096 - DNA, 31 bp, Artificial Sequence
  Description of Artificial Sequence:  Enzymatic Nucleic Acid
aggccacaggctagctacaacgaactggtca

SEQ ID NO: 6097 - DNA, 31 bp, Artificial Sequence
  Description of Artificial Sequence:  Enzymatic Nucleic Acid
acaggccaggctagctacaacgaacactggt

SEQ ID NO: 6098 - DNA, 31 bp, Artificial Sequence
  Description of Artificial Sequence:  Enzymatic Nucleic Acid
ggcacaggggctagctacaacgacacacact

SEQ ID NO: 6099 - DNA, 31 bp, Artificial Sequence
  Description of Artificial Sequence:  Enzymatic Nucleic Acid
agtgggcaggctagctacaacgaaggccaca

SEQ ID NO: 6100 - DNA, 31 bp, Artificial Sequence
  Description of Artificial Sequence:  Enzymatic Nucleic Acid
atagtgggggctagctacaacgaacaggcca

SEQ ID NO: 6101 - DNA, 31 bp, Artificial Sequence
  Description of Artificial Sequence:  Enzymatic Nucleic Acid
ccttatagggctagctacaacgagggcacag

SEQ ID NO: 6102 - DNA, 31 bp, Artificial Sequence
  Description of Artificial Sequence:  Enzymatic Nucleic Acid
ggtccttaggctagctacaacgaagtgggca

SEQ ID NO: 6103 - DNA, 31 bp, Artificial Sequence
  Description of Artificial Sequence:  Enzymatic Nucleic Acid
agggagggggctagctacaacgaccttatag

SEQ ID NO: 6104 - DNA, 31 bp, Artificial Sequence
  Description of Artificial Sequence:  Enzymatic Nucleic Acid
gggccacgggctagctacaacgaagaaggga

SEQ ID NO: 6105 - DNA, 31 bp, Artificial Sequence
  Description of Artificial Sequence:  Enzymatic Nucleic Acid
gcgggccaggctagctacaacgagcagaagg

SEQ ID NO: 6106 - DNA, 31 bp, Artificial Sequence
  Description of Artificial Sequence:  Enzymatic Nucleic Acid
gcagcgggggctagctacaacgacacgcaga

SEQ ID NO: 6107 - DNA, 31 bp, Artificial Sequence
  Description of Artificial Sequence:  Enzymatic Nucleic Acid
tggggcagggctagctacaacgagggccacg

SEQ ID NO: 6108 - DNA, 31 bp, Artificial Sequence
  Description of Artificial Sequence:  Enzymatic Nucleic Acid
cgctggggggctagctacaacgaagcgggcc

SEQ ID NO: 6109 - DNA, 31 bp, Artificial Sequence
  Description of Artificial Sequence:  Enzymatic Nucleic Acid
tcacaccgggctagctacaacgatggggcag

SEQ ID NO: 6110 - DNA, 31 bp, Artificial Sequence
  Description of Artificial Sequence:  Enzymatic Nucleic Acid
gtttcacaggctagctacaacgacgctgggg

SEQ ID NO: 6111 - DNA, 31 bp, Artificial Sequence
  Description of Artificial Sequence:  Enzymatic Nucleic Acid
aggtttcaggctagctacaacgaaccgctgg

SEQ ID NO: 6112 - DNA, 31 bp, Artificial Sequence
  Description of Artificial Sequence:  Enzymatic Nucleic Acid
aggtcaggggctagctacaacgattcacacc

SEQ ID NO: 6113 - DNA, 31 bp, Artificial Sequence
  Description of Artificial Sequence:  Enzymatic Nucleic Acid
aggagaggggctagctacaacgacaggtttc

SEQ ID NO: 6114 - DNA, 31 bp, Artificial Sequence
  Description of Artificial Sequence:  Enzymatic Nucleic Acid
tgggcatgggctagctacaacgaaggagagg

SEQ ID NO: 6115 - DNA, 31 bp, Artificial Sequence
  Description of Artificial Sequence:  Enzymatic Nucleic Acid
gatgggcaggctagctacaacgagtaggaga

SEQ ID NO: 6116 - DNA, 31 bp, Artificial Sequence
  Description of Artificial Sequence:  Enzymatic Nucleic Acid
cagatgggggctagctacaacgaatgtagga

SEQ ID NO: 6117 - DNA, 31 bp, Artificial Sequence
  Description of Artificial Sequence:  Enzymatic Nucleic Acid
cttccagaggctagctacaacgagggcatgt

SEQ ID NO: 6118 - DNA, 31 bp, Artificial Sequence
  Description of Artificial Sequence:  Enzymatic Nucleic Acid
tctggaaaggctagctacaacgattccagat

SEQ ID NO: 6119 - DNA, 31 bp, Artificial Sequence
  Description of Artificial Sequence:  Enzymatic Nucleic Acid
cctcctcaggctagctacaacgactggaaac

SEQ ID NO: 6120 - DNA, 31 bp, Artificial Sequence
  Description of Artificial Sequence:  Enzymatic Nucleic Acid
ggcatgcgggctagctacaacgacctcctca

SEQ ID NO: 6121 - DNA, 31 bp, Artificial Sequence
  Description of Artificial Sequence:  Enzymatic Nucleic Acid
ctggcatgggctagctacaacgagccctcct

SEQ ID NO: 6122 - DNA, 31 bp, Artificial Sequence
  Description of Artificial Sequence:  Enzymatic Nucleic Acid
ggctggcaggctagctacaacgagcgccctc

SEQ ID NO: 6123 - DNA, 31 bp, Artificial Sequence
  Description of Artificial Sequence:  Enzymatic Nucleic Acid
aaggctggggctagctacaacgaatgcgccc

SEQ ID NO: 6124 - DNA, 31 bp, Artificial Sequence
  Description of Artificial Sequence:  Enzymatic Nucleic Acid
gggcaaggggctagctacaacgatggcatgc

SEQ ID NO: 6125 - DNA, 31 bp, Artificial Sequence
  Description of Artificial Sequence:  Enzymatic Nucleic Acid
tgatggggggctagctacaacgaaaggctgg

SEQ ID NO: 6126 - DNA, 31 bp, Artificial Sequence
  Description of Artificial Sequence:  Enzymatic Nucleic Acid
gcagttgaggctagctacaacgaggggcaag

SEQ ID NO: 6127 - DNA, 31 bp, Artificial Sequence
  Description of Artificial Sequence:  Enzymatic Nucleic Acid
gggtgcagggctagctacaacgatgatgggg

SEQ ID NO: 6128 - DNA, 31 bp, Artificial Sequence
  Description of Artificial Sequence:  Enzymatic Nucleic Acid
agtgggtgggctagctacaacgaagttgatg

SEQ ID NO: 6129 - DNA, 31 bp, Artificial Sequence
  Description of Artificial Sequence:  Enzymatic Nucleic Acid
ggagtgggggctagctacaacgagcagttga

SEQ ID NO: 6130 - DNA, 31 bp, Artificial Sequence
  Description of Artificial Sequence:  Enzymatic Nucleic Acid
cacaggagggctagctacaacgagggtgcag

SEQ ID NO: 6131 - DNA, 31 bp, Artificial Sequence
  Description of Artificial Sequence:  Enzymatic Nucleic Acid
ggtccacaggctagctacaacgaaggagtgg

SEQ ID NO: 6132 - DNA, 31 bp, Artificial Sequence
  Description of Artificial Sequence:  Enzymatic Nucleic Acid
caggtccaggctagctacaacgaacaggagt

SEQ ID NO: 6133 - DNA, 31 bp, Artificial Sequence
  Description of Artificial Sequence:  Enzymatic Nucleic Acid
catccaggggctagctacaacgaccacacag

SEQ ID NO: 6134 - DNA, 31 bp, Artificial Sequence
  Description of Artificial Sequence:  Enzymatic Nucleic Acid
ccttgtcaggctagctacaacgaccaggtcc

SEQ ID NO: 6135 - DNA, 31 bp, Artificial Sequence
  Description of Artificial Sequence:  Enzymatic Nucleic Acid
agcccttgggctagctacaacgacatccagg

SEQ ID NO: 6136 - DNA, 31 bp, Artificial Sequence
  Description of Artificial Sequence:  Enzymatic Nucleic Acid
cggggcagggctagctacaacgaccttgtca

SEQ ID NO: 6137 - DNA, 31 bp, Artificial Sequence
  Description of Artificial Sequence:  Enzymatic Nucleic Acid
cggcggggggctagctacaacgaagcccttg

SEQ ID NO: 6138 - DNA, 31 bp, Artificial Sequence
  Description of Artificial Sequence:  Enzymatic Nucleic Acid
ctgctcggggctagctacaacgaggggcagc

SEQ ID NO: 6139 - DNA, 31 bp, Artificial Sequence
  Description of Artificial Sequence:  Enzymatic Nucleic Acid
gctctctgggctagctacaacgatcggcggg

SEQ ID NO: 6140 - DNA, 31 bp, Artificial Sequence
  Description of Artificial Sequence:  Enzymatic Nucleic Acid
agggctggggctagctacaacgatctctgct

SEQ ID NO: 6141 - DNA, 31 bp, Artificial Sequence
  Description of Artificial Sequence:  Enzymatic Nucleic Acid
tcagagggggctagctacaacgatggctctc

SEQ ID NO: 6142 - DNA, 31 bp, Artificial Sequence
  Description of Artificial Sequence:  Enzymatic Nucleic Acid
gatggacgggctagctacaacgacagagggc

SEQ ID NO: 6143 - DNA, 31 bp, Artificial Sequence
  Description of Artificial Sequence:  Enzymatic Nucleic Acid
atgatggaggctagctacaacgagtcagagg

SEQ ID NO: 6144 - DNA, 31 bp, Artificial Sequence
  Description of Artificial Sequence:  Enzymatic Nucleic Acid
agagatgaggctagctacaacgaggacgtca

SEQ ID NO: 6145 - DNA, 31 bp, Artificial Sequence
  Description of Artificial Sequence:  Enzymatic Nucleic Acid
cgcagagaggctagctacaacgagatggacg

SEQ ID NO: 6146 - DNA, 31 bp, Artificial Sequence
  Description of Artificial Sequence:  Enzymatic Nucleic Acid
aaccaccgggctagctacaacgaagagatga

SEQ ID NO: 6147 - DNA, 31 bp, Artificial Sequence
  Description of Artificial Sequence:  Enzymatic Nucleic Acid
gccaaccaggctagctacaacgacgcagaga

SEQ ID NO: 6148 - DNA, 31 bp, Artificial Sequence
  Description of Artificial Sequence:  Enzymatic Nucleic Acid
aatgccaaggctagctacaacgacaccgcag

SEQ ID NO: 6149 - DNA, 31 bp, Artificial Sequence
  Description of Artificial Sequence:  Enzymatic Nucleic Acid
gcagaatgggctagctacaacgacaaccacc

SEQ ID NO: 6150 - DNA, 31 bp, Artificial Sequence
  Description of Artificial Sequence:  Enzymatic Nucleic Acid
cagcagaaggctagctacaacgagccaacca

SEQ ID NO: 6151 - DNA, 31 bp, Artificial Sequence
  Description of Artificial Sequence:  Enzymatic Nucleic Acid
acgaccagggctagctacaacgaagaatgcc

SEQ ID NO: 6152 - DNA, 31 bp, Artificial Sequence
  Description of Artificial Sequence:  Enzymatic Nucleic Acid
gaccacgaggctagctacaacgacagcagaa

SEQ ID NO: 6153 - DNA, 31 bp, Artificial Sequence
  Description of Artificial Sequence:  Enzymatic Nucleic Acid
caagaccaggctagctacaacgagaccagca

SEQ ID NO: 6154 - DNA, 31 bp, Artificial Sequence
  Description of Artificial Sequence:  Enzymatic Nucleic Acid
ccccaagaggctagctacaacgacacgacca

SEQ ID NO: 6155 - DNA, 31 bp, Artificial Sequence
  Description of Artificial Sequence:  Enzymatic Nucleic Acid
aaagaccaggctagctacaacgaccccaaga

SEQ ID NO: 6156 - DNA, 31 bp, Artificial Sequence
  Description of Artificial Sequence:  Enzymatic Nucleic Acid
cccaaagaggctagctacaacgacaccccca

SEQ ID NO: 6157 - DNA, 31 bp, Artificial Sequence
  Description of Artificial Sequence:  Enzymatic Nucleic Acid
gatgaggaggctagctacaacgacccaaaga

SEQ ID NO: 6158 - DNA, 31 bp, Artificial Sequence
  Description of Artificial Sequence:  Enzymatic Nucleic Acid
tcgcttgaggctagctacaacgagaggatcc

SEQ ID NO: 6159 - DNA, 31 bp, Artificial Sequence
  Description of Artificial Sequence:  Enzymatic Nucleic Acid
tgccgtcgggctagctacaacgattgatgag

SEQ ID NO: 6160 - DNA, 31 bp, Artificial Sequence
  Description of Artificial Sequence:  Enzymatic Nucleic Acid
tgctgccgggctagctacaacgacgcttgat

SEQ ID NO: 6161 - DNA, 31 bp, Artificial Sequence
  Description of Artificial Sequence:  Enzymatic Nucleic Acid
ttctgctgggctagctacaacgacgtcgctt

SEQ ID NO: 6162 - DNA, 31 bp, Artificial Sequence
  Description of Artificial Sequence:  Enzymatic Nucleic Acid
atcttctgggctagctacaacgatgccgtcg

SEQ ID NO: 6163 - DNA, 31 bp, Artificial Sequence
  Description of Artificial Sequence:  Enzymatic Nucleic Acid
cttccggaggctagctacaacgacttctgct

SEQ ID NO: 6164 - DNA, 31 bp, Artificial Sequence
  Description of Artificial Sequence:  Enzymatic Nucleic Acid
atcgtgtaggctagctacaacgattccggat

SEQ ID NO: 6165 - DNA, 31 bp, Artificial Sequence
  Description of Artificial Sequence:  Enzymatic Nucleic Acid
gcatcgtgggctagctacaacgaacttccgg

SEQ ID NO: 6166 - DNA, 31 bp, Artificial Sequence
  Description of Artificial Sequence:  Enzymatic Nucleic Acid
ccgcatcgggctagctacaacgagtacttcc

SEQ ID NO: 6167 - DNA, 31 bp, Artificial Sequence
  Description of Artificial Sequence:  Enzymatic Nucleic Acid
tctccgcaggctagctacaacgacgtgtact

SEQ ID NO: 6168 - DNA, 31 bp, Artificial Sequence
  Description of Artificial Sequence:  Enzymatic Nucleic Acid
agtctccgggctagctacaacgaatcgtgta

SEQ ID NO: 6169 - DNA, 31 bp, Artificial Sequence
  Description of Artificial Sequence:  Enzymatic Nucleic Acid
tgcagcagggctagctacaacgactccgcat

SEQ ID NO: 6170 - DNA, 31 bp, Artificial Sequence
  Description of Artificial Sequence:  Enzymatic Nucleic Acid
tcctgcagggctagctacaacgaagtctccg

SEQ ID NO: 6171 - DNA, 31 bp, Artificial Sequence
  Description of Artificial Sequence:  Enzymatic Nucleic Acid
gtttcctgggctagctacaacgaagcagtct

SEQ ID NO: 6172 - DNA, 31 bp, Artificial Sequence
  Description of Artificial Sequence:  Enzymatic Nucleic Acid
cagctccgggctagctacaacgattcctgca

SEQ ID NO: 6173 - DNA, 31 bp, Artificial Sequence
  Description of Artificial Sequence:  Enzymatic Nucleic Acid
tccaccagggctagctacaacgatccgtttc

SEQ ID NO: 6174 - DNA, 31 bp, Artificial Sequence
  Description of Artificial Sequence:  Enzymatic Nucleic Acid
cggctccaggctagctacaacgacagctccg

SEQ ID NO: 6175 - DNA, 31 bp, Artificial Sequence
  Description of Artificial Sequence:  Enzymatic Nucleic Acid
gtcagcggggctagctacaacgatccaccag

SEQ ID NO: 6176 - DNA, 31 bp, Artificial Sequence
  Description of Artificial Sequence:  Enzymatic Nucleic Acid
ggtgtcagggctagctacaacgaggctccac

SEQ ID NO: 6177 - DNA, 31 bp, Artificial Sequence
  Description of Artificial Sequence:  Enzymatic Nucleic Acid
gctaggtgggctagctacaacgacagcggct

SEQ ID NO: 6178 - DNA, 31 bp, Artificial Sequence
  Description of Artificial Sequence:  Enzymatic Nucleic Acid
ccgctaggggctagctacaacgagtcagcgg

SEQ ID NO: 6179 - DNA, 31 bp, Artificial Sequence
  Description of Artificial Sequence:  Enzymatic Nucleic Acid
tcgctccgggctagctacaacgataggtgtc

SEQ ID NO: 6180 - DNA, 31 bp, Artificial Sequence
  Description of Artificial Sequence:  Enzymatic Nucleic Acid
gggcatcgggctagctacaacgatccgctag

SEQ ID NO: 6181 - DNA, 31 bp, Artificial Sequence
  Description of Artificial Sequence:  Enzymatic Nucleic Acid
gttgggcaggctagctacaacgacgctccgc

SEQ ID NO: 6182 - DNA, 31 bp, Artificial Sequence
  Description of Artificial Sequence:  Enzymatic Nucleic Acid
tggttgggggctagctacaacgaatcgctcc

SEQ ID NO: 6183 - DNA, 31 bp, Artificial Sequence
  Description of Artificial Sequence:  Enzymatic Nucleic Acid
gcgcctggggctagctacaacgatgggcatc

SEQ ID NO: 6184 - DNA, 31 bp, Artificial Sequence
  Description of Artificial Sequence:  Enzymatic Nucleic Acid
catctgcgggctagctacaacgactggttgg

SEQ ID NO: 6185 - DNA, 31 bp, Artificial Sequence
  Description of Artificial Sequence:  Enzymatic Nucleic Acid
cgcatctgggctagctacaacgagcctggtt

SEQ ID NO: 6186 - DNA, 31 bp, Artificial Sequence
  Description of Artificial Sequence:  Enzymatic Nucleic Acid
gatccgcaggctagctacaacgactgcgcct

SEQ ID NO: 6187 - DNA, 31 bp, Artificial Sequence
  Description of Artificial Sequence:  Enzymatic Nucleic Acid
aggatccgggctagctacaacgaatctgcgc

SEQ ID NO: 6188 - DNA, 31 bp, Artificial Sequence
  Description of Artificial Sequence:  Enzymatic Nucleic Acid
tttcaggaggctagctacaacgaccgcatct

SEQ ID NO: 6189 - DNA, 31 bp, Artificial Sequence
  Description of Artificial Sequence:  Enzymatic Nucleic Acid
cagctccgggctagctacaacgactctttca

SEQ ID NO: 6190 - DNA, 31 bp, Artificial Sequence
  Description of Artificial Sequence:  Enzymatic Nucleic Acid
ttcctcagggctagctacaacgatccgtctc

SEQ ID NO: 6191 - DNA, 31 bp, Artificial Sequence
  Description of Artificial Sequence:  Enzymatic Nucleic Acid
caccttcaggctagctacaacgacttcctca

SEQ ID NO: 6192 - DNA, 31 bp, Artificial Sequence
  Description of Artificial Sequence:  Enzymatic Nucleic Acid
tccaagcaggctagctacaacgacttcacct

SEQ ID NO: 6193 - DNA, 31 bp, Artificial Sequence
  Description of Artificial Sequence:  Enzymatic Nucleic Acid
gatccaagggctagctacaacgaaccttcac

SEQ ID NO: 6194 - DNA, 31 bp, Artificial Sequence
  Description of Artificial Sequence:  Enzymatic Nucleic Acid
gcgccagaggctagctacaacgaccaagcac

SEQ ID NO: 6195 - DNA, 31 bp, Artificial Sequence
  Description of Artificial Sequence:  Enzymatic Nucleic Acid
caaaagcgggctagctacaacgacagatcca

SEQ ID NO: 6196 - DNA, 31 bp, Artificial Sequence
  Description of Artificial Sequence:  Enzymatic Nucleic Acid
gccaaaagggctagctacaacgagccagatc

SEQ ID NO: 6197 - DNA, 31 bp, Artificial Sequence
  Description of Artificial Sequence:  Enzymatic Nucleic Acid
agactgtgggctagctacaacgacaaaagcg

SEQ ID NO: 6198 - DNA, 31 bp, Artificial Sequence
  Description of Artificial Sequence:  Enzymatic Nucleic Acid
gtagactgggctagctacaacgagccaaaag

SEQ ID NO: 6199 - DNA, 31 bp, Artificial Sequence
  Description of Artificial Sequence:  Enzymatic Nucleic Acid
cttgtagaggctagctacaacgatgtgccaa

SEQ ID NO: 6200 - DNA, 31 bp, Artificial Sequence
  Description of Artificial Sequence:  Enzymatic Nucleic Acid
tgcccttgggctagctacaacgaagactgtg

SEQ ID NO: 6201 - DNA, 31 bp, Artificial Sequence
  Description of Artificial Sequence:  Enzymatic Nucleic Acid
tccagatgggctagctacaacgaccttgtag

SEQ ID NO: 6202 - DNA, 31 bp, Artificial Sequence
  Description of Artificial Sequence:  Enzymatic Nucleic Acid
gatccagaggctagctacaacgagcccttgt

SEQ ID NO: 6203 - DNA, 31 bp, Artificial Sequence
  Description of Artificial Sequence:  Enzymatic Nucleic Acid
atcagggaggctagctacaacgaccagatgc

SEQ ID NO: 6204 - DNA, 31 bp, Artificial Sequence
  Description of Artificial Sequence:  Enzymatic Nucleic Acid
tctccccaggctagctacaacgacagggatc

SEQ ID NO: 6205 - DNA, 31 bp, Artificial Sequence
  Description of Artificial Sequence:  Enzymatic Nucleic Acid
ttttcacaggctagctacaacgatctcccca

SEQ ID NO: 6206 - DNA, 31 bp, Artificial Sequence
  Description of Artificial Sequence:  Enzymatic Nucleic Acid
aattttcaggctagctacaacgaattctccc

SEQ ID NO: 6207 - DNA, 31 bp, Artificial Sequence
  Description of Artificial Sequence:  Enzymatic Nucleic Acid
cactggaaggctagctacaacgatttcacat

SEQ ID NO: 6208 - DNA, 31 bp, Artificial Sequence
  Description of Artificial Sequence:  Enzymatic Nucleic Acid
gatggccaggctagctacaacgatggaattt

SEQ ID NO: 6209 - DNA, 31 bp, Artificial Sequence
  Description of Artificial Sequence:  Enzymatic Nucleic Acid
tttgatggggctagctacaacgacactggaa

SEQ ID NO: 6210 - DNA, 31 bp, Artificial Sequence
  Description of Artificial Sequence:  Enzymatic Nucleic Acid
cactttgaggctagctacaacgaggccactg

SEQ ID NO: 6211 - DNA, 31 bp, Artificial Sequence
  Description of Artificial Sequence:  Enzymatic Nucleic Acid
cctcaacaggctagctacaacgatttgatgg

SEQ ID NO: 6212 - DNA, 31 bp, Artificial Sequence
  Description of Artificial Sequence:  Enzymatic Nucleic Acid
tccctcaaggctagctacaacgaactttgat

SEQ ID NO: 6213 - DNA, 31 bp, Artificial Sequence
  Description of Artificial Sequence:  Enzymatic Nucleic Acid
gggatgtgggctagctacaacgatttccctc

SEQ ID NO: 6214 - DNA, 31 bp, Artificial Sequence
  Description of Artificial Sequence:  Enzymatic Nucleic Acid
gggggatgggctagctacaacgagttttccc

SEQ ID NO: 6215 - DNA, 31 bp, Artificial Sequence
  Description of Artificial Sequence:  Enzymatic Nucleic Acid
ttgggggaggctagctacaacgagtgttttc

SEQ ID NO: 6216 - DNA, 31 bp, Artificial Sequence
  Description of Artificial Sequence:  Enzymatic Nucleic Acid
tttgttggggctagctacaacgatttggggg

SEQ ID NO: 6217 - DNA, 31 bp, Artificial Sequence
  Description of Artificial Sequence:  Enzymatic Nucleic Acid
tttctttgggctagctacaacgatggctttg

SEQ ID NO: 6218 - DNA, 31 bp, Artificial Sequence
  Description of Artificial Sequence:  Enzymatic Nucleic Acid
gtctaagaggctagctacaacgattctttgt

SEQ ID NO: 6219 - DNA, 31 bp, Artificial Sequence
  Description of Artificial Sequence:  Enzymatic Nucleic Acid
atgcttcgggctagctacaacgactaagatt

SEQ ID NO: 6220 - DNA, 31 bp, Artificial Sequence
  Description of Artificial Sequence:  Enzymatic Nucleic Acid
cacgtatgggctagctacaacgattcgtcta

SEQ ID NO: 6221 - DNA, 31 bp, Artificial Sequence
  Description of Artificial Sequence:  Enzymatic Nucleic Acid
atcacgtaggctagctacaacgagcttcgtc

SEQ ID NO: 6222 - DNA, 31 bp, Artificial Sequence
  Description of Artificial Sequence:  Enzymatic Nucleic Acid
ccatcacgggctagctacaacgaatgcttcg

SEQ ID NO: 6223 - DNA, 31 bp, Artificial Sequence
  Description of Artificial Sequence:  Enzymatic Nucleic Acid
agccatcaggctagctacaacgagtatgctt

SEQ ID NO: 6224 - DNA, 31 bp, Artificial Sequence
  Description of Artificial Sequence:  Enzymatic Nucleic Acid
accagccaggctagctacaacgacacgtatg

SEQ ID NO: 6225 - DNA, 31 bp, Artificial Sequence
  Description of Artificial Sequence:  Enzymatic Nucleic Acid
cacaccagggctagctacaacgacatcacgt

SEQ ID NO: 6226 - DNA, 31 bp, Artificial Sequence
  Description of Artificial Sequence:  Enzymatic Nucleic Acid
agcccacaggctagctacaacgacagccatc

SEQ ID NO: 6227 - DNA, 31 bp, Artificial Sequence
  Description of Artificial Sequence:  Enzymatic Nucleic Acid
ggagcccaggctagctacaacgaaccagcca

SEQ ID NO: 6228 - DNA, 31 bp, Artificial Sequence
  Description of Artificial Sequence:  Enzymatic Nucleic Acid
atggggagggctagctacaacgaccacacca

SEQ ID NO: 6229 - DNA, 31 bp, Artificial Sequence
  Description of Artificial Sequence:  Enzymatic Nucleic Acid
gagacataggctagctacaacgaggggagcc

SEQ ID NO: 6230 - DNA, 31 bp, Artificial Sequence
  Description of Artificial Sequence:  Enzymatic Nucleic Acid
gggagacaggctagctacaacgaatggggag

SEQ ID NO: 6231 - DNA, 31 bp, Artificial Sequence
  Description of Artificial Sequence:  Enzymatic Nucleic Acid
gcgggagaggctagctacaacgaatatgggg

SEQ ID NO: 6232 - DNA, 31 bp, Artificial Sequence
  Description of Artificial Sequence:  Enzymatic Nucleic Acid
ccagaaggggctagctacaacgagggagaca

SEQ ID NO: 6233 - DNA, 31 bp, Artificial Sequence
  Description of Artificial Sequence:  Enzymatic Nucleic Acid
ggcagatgggctagctacaacgaccagaagg

SEQ ID NO: 6234 - DNA, 31 bp, Artificial Sequence
  Description of Artificial Sequence:  Enzymatic Nucleic Acid
caggcagaggctagctacaacgagcccagaa

SEQ ID NO: 6235 - DNA, 31 bp, Artificial Sequence
  Description of Artificial Sequence:  Enzymatic Nucleic Acid
atgtcaggggctagctacaacgaagatgccc

SEQ ID NO: 6236 - DNA, 31 bp, Artificial Sequence
  Description of Artificial Sequence:  Enzymatic Nucleic Acid
cgtggatgggctagctacaacgacaggcaga

SEQ ID NO: 6237 - DNA, 31 bp, Artificial Sequence
  Description of Artificial Sequence:  Enzymatic Nucleic Acid
accgtggaggctagctacaacgagtcaggca

SEQ ID NO: 6238 - DNA, 31 bp, Artificial Sequence
  Description of Artificial Sequence:  Enzymatic Nucleic Acid
ctgcaccgggctagctacaacgaggatgtca

SEQ ID NO: 6239 - DNA, 31 bp, Artificial Sequence
  Description of Artificial Sequence:  Enzymatic Nucleic Acid
cagctgcaggctagctacaacgacgtggatg

SEQ ID NO: 6240 - DNA, 31 bp, Artificial Sequence
  Description of Artificial Sequence:  Enzymatic Nucleic Acid
accagctgggctagctacaacgaaccgtgga

SEQ ID NO: 6241 - DNA, 31 bp, Artificial Sequence
  Description of Artificial Sequence:  Enzymatic Nucleic Acid
gtcaccagggctagctacaacgatgcaccgt

SEQ ID NO: 6242 - DNA, 31 bp, Artificial Sequence
  Description of Artificial Sequence:  Enzymatic Nucleic Acid
ctgtgtcaggctagctacaacgacagctgca

SEQ ID NO: 6243 - DNA, 31 bp, Artificial Sequence
  Description of Artificial Sequence:  Enzymatic Nucleic Acid
aagctgtgggctagctacaacgacaccagct

SEQ ID NO: 6244 - DNA, 31 bp, Artificial Sequence
  Description of Artificial Sequence:  Enzymatic Nucleic Acid
ataagctgggctagctacaacgagtcaccag

SEQ ID NO: 6245 - DNA, 31 bp, Artificial Sequence
  Description of Artificial Sequence:  Enzymatic Nucleic Acid
ggcataagggctagctacaacgatgtgtcac

SEQ ID NO: 6246 - DNA, 31 bp, Artificial Sequence
  Description of Artificial Sequence:  Enzymatic Nucleic Acid
atagggcaggctagctacaacgaaagctgtg

SEQ ID NO: 6247 - DNA, 31 bp, Artificial Sequence
  Description of Artificial Sequence:  Enzymatic Nucleic Acid
ccatagggggctagctacaacgaataagctg

SEQ ID NO: 6248 - DNA, 31 bp, Artificial Sequence
  Description of Artificial Sequence:  Enzymatic Nucleic Acid
ggcagccaggctagctacaacgaagggcata

SEQ ID NO: 6249 - DNA, 31 bp, Artificial Sequence
  Description of Artificial Sequence:  Enzymatic Nucleic Acid
agaggcagggctagctacaacgacatagggc

SEQ ID NO: 6250 - DNA, 31 bp, Artificial Sequence
  Description of Artificial Sequence:  Enzymatic Nucleic Acid
ctaagaggggctagctacaacgaagccatag

SEQ ID NO: 6251 - DNA, 31 bp, Artificial Sequence
  Description of Artificial Sequence:  Enzymatic Nucleic Acid
ggacatggggctagctacaacgactaagagg

SEQ ID NO: 6252 - DNA, 31 bp, Artificial Sequence
  Description of Artificial Sequence:  Enzymatic Nucleic Acid
cccggacaggctagctacaacgaggtctaag

SEQ ID NO: 6253 - DNA, 31 bp, Artificial Sequence
  Description of Artificial Sequence:  Enzymatic Nucleic Acid
ttcccggaggctagctacaacgaatggtcta

SEQ ID NO: 6254 - DNA, 31 bp, Artificial Sequence
  Description of Artificial Sequence:  Enzymatic Nucleic Acid
gtccgcggggctagctacaacgatttcccgg

SEQ ID NO: 6255 - DNA, 31 bp, Artificial Sequence
  Description of Artificial Sequence:  Enzymatic Nucleic Acid
ggcgtccgggctagctacaacgaggttttcc

SEQ ID NO: 6256 - DNA, 31 bp, Artificial Sequence
  Description of Artificial Sequence:  Enzymatic Nucleic Acid
cccaggcgggctagctacaacgaccgcggtt

SEQ ID NO: 6257 - DNA, 31 bp, Artificial Sequence
  Description of Artificial Sequence:  Enzymatic Nucleic Acid
agcccaggggctagctacaacgagtccgcgg

SEQ ID NO: 6258 - DNA, 31 bp, Artificial Sequence
  Description of Artificial Sequence:  Enzymatic Nucleic Acid
cctgggagggctagctacaacgaccaggcgt

SEQ ID NO: 6259 - DNA, 31 bp, Artificial Sequence
  Description of Artificial Sequence:  Enzymatic Nucleic Acid
tcagcaggggctagctacaacgacctgggag

SEQ ID NO: 6260 - DNA, 31 bp, Artificial Sequence
  Description of Artificial Sequence:  Enzymatic Nucleic Acid
cagttcagggctagctacaacgaaggtcctg

SEQ ID NO: 6261 - DNA, 31 bp, Artificial Sequence
  Description of Artificial Sequence:  Enzymatic Nucleic Acid
tacaccagggctagctacaacgatcagcagg

SEQ ID NO: 6262 - DNA, 31 bp, Artificial Sequence
  Description of Artificial Sequence:  Enzymatic Nucleic Acid
tgcatacaggctagctacaacgacagttcag

SEQ ID NO: 6263 - DNA, 31 bp, Artificial Sequence
  Description of Artificial Sequence:  Enzymatic Nucleic Acid
tctgcataggctagctacaacgaaccagttc

SEQ ID NO: 6264 - DNA, 31 bp, Artificial Sequence
  Description of Artificial Sequence:  Enzymatic Nucleic Acid
aatctgcaggctagctacaacgaacaccagt

SEQ ID NO: 6265 - DNA, 31 bp, Artificial Sequence
  Description of Artificial Sequence:  Enzymatic Nucleic Acid
gcaatctgggctagctacaacgaatacacca

SEQ ID NO: 6266 - DNA, 31 bp, Artificial Sequence
  Description of Artificial Sequence:  Enzymatic Nucleic Acid
cttggcaaggctagctacaacgactgcatac

SEQ ID NO: 6267 - DNA, 31 bp, Artificial Sequence
  Description of Artificial Sequence:  Enzymatic Nucleic Acid
ccccttggggctagctacaacgaaatctgca

SEQ ID NO: 6268 - DNA, 31 bp, Artificial Sequence
  Description of Artificial Sequence:  Enzymatic Nucleic Acid
gtagctcaggctagctacaacgaccccttgg

SEQ ID NO: 6269 - DNA, 31 bp, Artificial Sequence
  Description of Artificial Sequence:  Enzymatic Nucleic Acid
ccaggtagggctagctacaacgatcatcccc

SEQ ID NO: 6270 - DNA, 31 bp, Artificial Sequence
  Description of Artificial Sequence:  Enzymatic Nucleic Acid
cctccaggggctagctacaacgaagctcatc

SEQ ID NO: 6271 - DNA, 31 bp, Artificial Sequence
  Description of Artificial Sequence:  Enzymatic Nucleic Acid
gccgcacaggctagctacaacgacctccagg

SEQ ID NO: 6272 - DNA, 31 bp, Artificial Sequence
  Description of Artificial Sequence:  Enzymatic Nucleic Acid
gagccgcaggctagctacaacgaatcctcca

SEQ ID NO: 6273 - DNA, 31 bp, Artificial Sequence
  Description of Artificial Sequence:  Enzymatic Nucleic Acid
acgagccgggctagctacaacgaacatcctc

SEQ ID NO: 6274 - DNA, 31 bp, Artificial Sequence
  Description of Artificial Sequence:  Enzymatic Nucleic Acid
tgtacgagggctagctacaacgacgcacatc

SEQ ID NO: 6275 - DNA, 31 bp, Artificial Sequence
  Description of Artificial Sequence:  Enzymatic Nucleic Acid
cctgtgtaggctagctacaacgagagccgca

SEQ ID NO: 6276 - DNA, 31 bp, Artificial Sequence
  Description of Artificial Sequence:  Enzymatic Nucleic Acid
tccctgtgggctagctacaacgaacgagccg

SEQ ID NO: 6277 - DNA, 31 bp, Artificial Sequence
  Description of Artificial Sequence:  Enzymatic Nucleic Acid
agtccctgggctagctacaacgagtacgagc

SEQ ID NO: 6278 - DNA, 31 bp, Artificial Sequence
  Description of Artificial Sequence:  Enzymatic Nucleic Acid
cggccaagggctagctacaacgaccctgtgt

SEQ ID NO: 6279 - DNA, 31 bp, Artificial Sequence
  Description of Artificial Sequence:  Enzymatic Nucleic Acid
ccgagcggggctagctacaacgacaagtccc

SEQ ID NO: 6280 - DNA, 31 bp, Artificial Sequence
  Description of Artificial Sequence:  Enzymatic Nucleic Acid
gttccgagggctagctacaacgaggccaagt

SEQ ID NO: 6281 - DNA, 31 bp, Artificial Sequence
  Description of Artificial Sequence:  Enzymatic Nucleic Acid
ccagcacgggctagctacaacgatccgagcg

SEQ ID NO: 6282 - DNA, 31 bp, Artificial Sequence
  Description of Artificial Sequence:  Enzymatic Nucleic Acid
gaccagcaggctagctacaacgagttccgag

SEQ ID NO: 6283 - DNA, 31 bp, Artificial Sequence
  Description of Artificial Sequence:  Enzymatic Nucleic Acid
ttgaccagggctagctacaacgaacgttccg

SEQ ID NO: 6284 - DNA, 31 bp, Artificial Sequence
  Description of Artificial Sequence:  Enzymatic Nucleic Acid
actcttgaggctagctacaacgacagcacgt

SEQ ID NO: 6285 - DNA, 31 bp, Artificial Sequence
  Description of Artificial Sequence:  Enzymatic Nucleic Acid
ggttgggaggctagctacaacgatcttgacc

SEQ ID NO: 6286 - DNA, 31 bp, Artificial Sequence
  Description of Artificial Sequence:  Enzymatic Nucleic Acid
tgacatggggctagctacaacgatgggactc

SEQ ID NO: 6287 - DNA, 31 bp, Artificial Sequence
  Description of Artificial Sequence:  Enzymatic Nucleic Acid
ttttgacaggctagctacaacgaggttggga

SEQ ID NO: 6288 - DNA, 31 bp, Artificial Sequence
  Description of Artificial Sequence:  Enzymatic Nucleic Acid
aattttgaggctagctacaacgaatggttgg

SEQ ID NO: 6289 - DNA, 31 bp, Artificial Sequence
  Description of Artificial Sequence:  Enzymatic Nucleic Acid
gtctgtaaggctagctacaacgatttgacat

SEQ ID NO: 6290 - DNA, 31 bp, Artificial Sequence
  Description of Artificial Sequence:  Enzymatic Nucleic Acid
gaagtctgggctagctacaacgaaattttga

SEQ ID NO: 6291 - DNA, 31 bp, Artificial Sequence
  Description of Artificial Sequence:  Enzymatic Nucleic Acid
gcccgaagggctagctacaacgactgtaatt

SEQ ID NO: 6292 - DNA, 31 bp, Artificial Sequence
  Description of Artificial Sequence:  Enzymatic Nucleic Acid
cgagccagggctagctacaacgaccgaagtc

SEQ ID NO: 6293 - DNA, 31 bp, Artificial Sequence
  Description of Artificial Sequence:  Enzymatic Nucleic Acid
cagccgagggctagctacaacgacagcccga

SEQ ID NO: 6294 - DNA, 31 bp, Artificial Sequence
  Description of Artificial Sequence:  Enzymatic Nucleic Acid
tccagcagggctagctacaacgacgagccag

SEQ ID NO: 6295 - DNA, 31 bp, Artificial Sequence
  Description of Artificial Sequence:  Enzymatic Nucleic Acid
atgtccagggctagctacaacgaagccgagc

SEQ ID NO: 6296 - DNA, 31 bp, Artificial Sequence
  Description of Artificial Sequence:  Enzymatic Nucleic Acid
cgtcaatgggctagctacaacgaccagcagc

SEQ ID NO: 6297 - DNA, 31 bp, Artificial Sequence
  Description of Artificial Sequence:  Enzymatic Nucleic Acid
ctcgtcaaggctagctacaacgagtccagca

SEQ ID NO: 6298 - DNA, 31 bp, Artificial Sequence
  Description of Artificial Sequence:  Enzymatic Nucleic Acid
ctgtctcgggctagctacaacgacaatgtcc

SEQ ID NO: 6299 - DNA, 31 bp, Artificial Sequence
  Description of Artificial Sequence:  Enzymatic Nucleic Acid
gtactctgggctagctacaacgactcgtcaa

SEQ ID NO: 6300 - DNA, 31 bp, Artificial Sequence
  Description of Artificial Sequence:  Enzymatic Nucleic Acid
gcatggtaggctagctacaacgatctgtctc

SEQ ID NO: 6301 - DNA, 31 bp, Artificial Sequence
  Description of Artificial Sequence:  Enzymatic Nucleic Acid
ctgcatggggctagctacaacgaactctgtc

SEQ ID NO: 6302 - DNA, 31 bp, Artificial Sequence
  Description of Artificial Sequence:  Enzymatic Nucleic Acid
catctgcaggctagctacaacgaggtactct

SEQ ID NO: 6303 - DNA, 31 bp, Artificial Sequence
  Description of Artificial Sequence:  Enzymatic Nucleic Acid
cccatctgggctagctacaacgaatggtact

SEQ ID NO: 6304 - DNA, 31 bp, Artificial Sequence
  Description of Artificial Sequence:  Enzymatic Nucleic Acid
tgcccccaggctagctacaacgactgcatgg

SEQ ID NO: 6305 - DNA, 31 bp, Artificial Sequence
  Description of Artificial Sequence:  Enzymatic Nucleic Acid
gcaccttgggctagctacaacgaccccatct

SEQ ID NO: 6306 - DNA, 31 bp, Artificial Sequence
  Description of Artificial Sequence:  Enzymatic Nucleic Acid
gatgggcaggctagctacaacgacttgcccc

SEQ ID NO: 6307 - DNA, 31 bp, Artificial Sequence
  Description of Artificial Sequence:  Enzymatic Nucleic Acid
ttgatgggggctagctacaacgaaccttgcc

SEQ ID NO: 6308 - DNA, 31 bp, Artificial Sequence
  Description of Artificial Sequence:  Enzymatic Nucleic Acid
ccacttgaggctagctacaacgagggcacct

SEQ ID NO: 6309 - DNA, 31 bp, Artificial Sequence
  Description of Artificial Sequence:  Enzymatic Nucleic Acid
gccatccaggctagctacaacgattgatggg

SEQ ID NO: 6310 - DNA, 31 bp, Artificial Sequence
  Description of Artificial Sequence:  Enzymatic Nucleic Acid
cagcgccaggctagctacaacgaccacttga

SEQ ID NO: 6311 - DNA, 31 bp, Artificial Sequence
  Description of Artificial Sequence:  Enzymatic Nucleic Acid
ctccagcgggctagctacaacgacatccact

SEQ ID NO: 6312 - DNA, 31 bp, Artificial Sequence
  Description of Artificial Sequence:  Enzymatic Nucleic Acid
gactccagggctagctacaacgagccatcca

SEQ ID NO: 6313 - DNA, 31 bp, Artificial Sequence
  Description of Artificial Sequence:  Enzymatic Nucleic Acid
agaatggaggctagctacaacgatccagcgc

SEQ ID NO: 6314 - DNA, 31 bp, Artificial Sequence
  Description of Artificial Sequence:  Enzymatic Nucleic Acid
gcggagaaggctagctacaacgaggactcca

SEQ ID NO: 6315 - DNA, 31 bp, Artificial Sequence
  Description of Artificial Sequence:  Enzymatic Nucleic Acid
accgccggggctagctacaacgaggagaatg

SEQ ID NO: 6316 - DNA, 31 bp, Artificial Sequence
  Description of Artificial Sequence:  Enzymatic Nucleic Acid
gtgaaccgggctagctacaacgacggcggag

SEQ ID NO: 6317 - DNA, 31 bp, Artificial Sequence
  Description of Artificial Sequence:  Enzymatic Nucleic Acid
tgggtgaaggctagctacaacgacgccggcg

SEQ ID NO: 6318 - DNA, 31 bp, Artificial Sequence
  Description of Artificial Sequence:  Enzymatic Nucleic Acid
ctggtgggggctagctacaacgagaaccgcc

SEQ ID NO: 6319 - DNA, 31 bp, Artificial Sequence
  Description of Artificial Sequence:  Enzymatic Nucleic Acid
cactctggggctagctacaacgagggtgaac

SEQ ID NO: 6320 - DNA, 31 bp, Artificial Sequence
  Description of Artificial Sequence:  Enzymatic Nucleic Acid
acacatcaggctagctacaacgatctggtgg

SEQ ID NO: 6321 - DNA, 31 bp, Artificial Sequence
  Description of Artificial Sequence:  Enzymatic Nucleic Acid
tccacacaggctagctacaacgacactctgg

SEQ ID NO: 6322 - DNA, 31 bp, Artificial Sequence
  Description of Artificial Sequence:  Enzymatic Nucleic Acid
actccacaggctagctacaacgaatcactct

SEQ ID NO: 6323 - DNA, 31 bp, Artificial Sequence
  Description of Artificial Sequence:  Enzymatic Nucleic Acid
taactccaggctagctacaacgaacatcact

SEQ ID NO: 6324 - DNA, 31 bp, Artificial Sequence
  Description of Artificial Sequence:  Enzymatic Nucleic Acid
caccataaggctagctacaacgatccacaca

SEQ ID NO: 6325 - DNA, 31 bp, Artificial Sequence
  Description of Artificial Sequence:  Enzymatic Nucleic Acid
tcacaccaggctagctacaacgaaactccac

SEQ ID NO: 6326 - DNA, 31 bp, Artificial Sequence
  Description of Artificial Sequence:  Enzymatic Nucleic Acid
cagtcacaggctagctacaacgacataactc

SEQ ID NO: 6327 - DNA, 31 bp, Artificial Sequence
  Description of Artificial Sequence:  Enzymatic Nucleic Acid
cacagtcaggctagctacaacgaaccataac

SEQ ID NO: 6328 - DNA, 31 bp, Artificial Sequence
  Description of Artificial Sequence:  Enzymatic Nucleic Acid
ccacacagggctagctacaacgacacaccat

SEQ ID NO: 6329 - DNA, 31 bp, Artificial Sequence
  Description of Artificial Sequence:  Enzymatic Nucleic Acid
ctcccacaggctagctacaacgaagtcacac

SEQ ID NO: 6330 - DNA, 31 bp, Artificial Sequence
  Description of Artificial Sequence:  Enzymatic Nucleic Acid
agctcccaggctagctacaacgaacagtcac

SEQ ID NO: 6331 - DNA, 31 bp, Artificial Sequence
  Description of Artificial Sequence:  Enzymatic Nucleic Acid
gtcatcagggctagctacaacgatcccacac

SEQ ID NO: 6332 - DNA, 31 bp, Artificial Sequence
  Description of Artificial Sequence:  Enzymatic Nucleic Acid
aaaagtcaggctagctacaacgacagctccc

SEQ ID NO: 6333 - DNA, 31 bp, Artificial Sequence
  Description of Artificial Sequence:  Enzymatic Nucleic Acid
cccaaaagggctagctacaacgacatcagct

SEQ ID NO: 6334 - DNA, 31 bp, Artificial Sequence
  Description of Artificial Sequence:  Enzymatic Nucleic Acid
aggtttggggctagctacaacgacccaaaag

SEQ ID NO: 6335 - DNA, 31 bp, Artificial Sequence
  Description of Artificial Sequence:  Enzymatic Nucleic Acid
tcgtaaggggctagctacaacgattggcccc

SEQ ID NO: 6336 - DNA, 31 bp, Artificial Sequence
  Description of Artificial Sequence:  Enzymatic Nucleic Acid
tcccatcgggctagctacaacgaaaggtttg

SEQ ID NO: 6337 - DNA, 31 bp, Artificial Sequence
  Description of Artificial Sequence:  Enzymatic Nucleic Acid
ggatcccaggctagctacaacgacgtaaggt

SEQ ID NO: 6338 - DNA, 31 bp, Artificial Sequence
  Description of Artificial Sequence:  Enzymatic Nucleic Acid
ggctgggaggctagctacaacgacccatcgt

SEQ ID NO: 6339 - DNA, 31 bp, Artificial Sequence
  Description of Artificial Sequence:  Enzymatic Nucleic Acid
ctcccgggggctagctacaacgatgggatcc

SEQ ID NO: 6340 - DNA, 31 bp, Artificial Sequence
  Description of Artificial Sequence:  Enzymatic Nucleic Acid
gtcagggaggctagctacaacgactcccggg

SEQ ID NO: 6341 - DNA, 31 bp, Artificial Sequence
  Description of Artificial Sequence:  Enzymatic Nucleic Acid
ccagcaggggctagctacaacgacagggatc

SEQ ID NO: 6342 - DNA, 31 bp, Artificial Sequence
  Description of Artificial Sequence:  Enzymatic Nucleic Acid
ttttccagggctagctacaacgaaggtcagg

SEQ ID NO: 6343 - DNA, 31 bp, Artificial Sequence
  Description of Artificial Sequence:  Enzymatic Nucleic Acid
ggcagccgggctagctacaacgatccccctt

SEQ ID NO: 6344 - DNA, 31 bp, Artificial Sequence
  Description of Artificial Sequence:  Enzymatic Nucleic Acid
tggggcagggctagctacaacgacgctcccc

SEQ ID NO: 6345 - DNA, 31 bp, Artificial Sequence
  Description of Artificial Sequence:  Enzymatic Nucleic Acid
ggctggggggctagctacaacgaagccgctc

SEQ ID NO: 6346 - DNA, 31 bp, Artificial Sequence
  Description of Artificial Sequence:  Enzymatic Nucleic Acid
atggggggggctagctacaacgatggggcag

SEQ ID NO: 6347 - DNA, 31 bp, Artificial Sequence
  Description of Artificial Sequence:  Enzymatic Nucleic Acid
ggtgcagaggctagctacaacgaggggggct

SEQ ID NO: 6348 - DNA, 31 bp, Artificial Sequence
  Description of Artificial Sequence:  Enzymatic Nucleic Acid
caatggtgggctagctacaacgaagatgggg

SEQ ID NO: 6349 - DNA, 31 bp, Artificial Sequence
  Description of Artificial Sequence:  Enzymatic Nucleic Acid
atcaatggggctagctacaacgagcagatgg

SEQ ID NO: 6350 - DNA, 31 bp, Artificial Sequence
  Description of Artificial Sequence:  Enzymatic Nucleic Acid
gacatcaaggctagctacaacgaggtgcaga

SEQ ID NO: 6351 - DNA, 31 bp, Artificial Sequence
  Description of Artificial Sequence:  Enzymatic Nucleic Acid
tgtagacaggctagctacaacgacaatggtg

SEQ ID NO: 6352 - DNA, 31 bp, Artificial Sequence
  Description of Artificial Sequence:  Enzymatic Nucleic Acid
catgtagaggctagctacaacgaatcaatgg

SEQ ID NO: 6353 - DNA, 31 bp, Artificial Sequence
  Description of Artificial Sequence:  Enzymatic Nucleic Acid
tgatcatgggctagctacaacgaagacatca

SEQ ID NO: 6354 - DNA, 31 bp, Artificial Sequence
  Description of Artificial Sequence:  Enzymatic Nucleic Acid
catgatcaggctagctacaacgagtagacat

SEQ ID NO: 6355 - DNA, 31 bp, Artificial Sequence
  Description of Artificial Sequence:  Enzymatic Nucleic Acid
gaccatgaggctagctacaacgacatgtaga

SEQ ID NO: 6356 - DNA, 31 bp, Artificial Sequence
  Description of Artificial Sequence:  Enzymatic Nucleic Acid
tttgaccaggctagctacaacgagatcatgt

SEQ ID NO: 6357 - DNA, 31 bp, Artificial Sequence
  Description of Artificial Sequence:  Enzymatic Nucleic Acid
acatttgaggctagctacaacgacatgatca

SEQ ID NO: 6358 - DNA, 31 bp, Artificial Sequence
  Description of Artificial Sequence:  Enzymatic Nucleic Acid
atccaacaggctagctacaacgattgaccat

SEQ ID NO: 6359 - DNA, 31 bp, Artificial Sequence
  Description of Artificial Sequence:  Enzymatic Nucleic Acid
tcatccaaggctagctacaacgaatttgacc

SEQ ID NO: 6360 - DNA, 31 bp, Artificial Sequence
  Description of Artificial Sequence:  Enzymatic Nucleic Acid
gtcaatcaggctagctacaacgaccaacatt

SEQ ID NO: 6361 - DNA, 31 bp, Artificial Sequence
  Description of Artificial Sequence:  Enzymatic Nucleic Acid
agagtcaaggctagctacaacgacatccaac

SEQ ID NO: 6362 - DNA, 31 bp, Artificial Sequence
  Description of Artificial Sequence:  Enzymatic Nucleic Acid
attcagagggctagctacaacgacaatcatc

SEQ ID NO: 6363 - DNA, 31 bp, Artificial Sequence
  Description of Artificial Sequence:  Enzymatic Nucleic Acid
ggccgacaggctagctacaacgatcagagtc

SEQ ID NO: 6364 - DNA, 31 bp, Artificial Sequence
  Description of Artificial Sequence:  Enzymatic Nucleic Acid
ttggccgaggctagctacaacgaattcagag

SEQ ID NO: 6365 - DNA, 31 bp, Artificial Sequence
  Description of Artificial Sequence:  Enzymatic Nucleic Acid
aatcttggggctagctacaacgacgacattc

SEQ ID NO: 6366 - DNA, 31 bp, Artificial Sequence
  Description of Artificial Sequence:  Enzymatic Nucleic Acid
tcccggaaggctagctacaacgacttggccg

SEQ ID NO: 6367 - DNA, 31 bp, Artificial Sequence
  Description of Artificial Sequence:  Enzymatic Nucleic Acid
gacaccaaggctagctacaacgatcccggaa

SEQ ID NO: 6368 - DNA, 31 bp, Artificial Sequence
  Description of Artificial Sequence:  Enzymatic Nucleic Acid
ttcagacaggctagctacaacgacaactccc

SEQ ID NO: 6369 - DNA, 31 bp, Artificial Sequence
  Description of Artificial Sequence:  Enzymatic Nucleic Acid
aattcagaggctagctacaacgaaccaactc

SEQ ID NO: 6370 - DNA, 31 bp, Artificial Sequence
  Description of Artificial Sequence:  Enzymatic Nucleic Acid
cgggagaaggctagctacaacgatcagacac

SEQ ID NO: 6371 - DNA, 31 bp, Artificial Sequence
  Description of Artificial Sequence:  Enzymatic Nucleic Acid
tggccatgggctagctacaacgagggagaat

SEQ ID NO: 6372 - DNA, 31 bp, Artificial Sequence
  Description of Artificial Sequence:  Enzymatic Nucleic Acid
cctggccaggctagctacaacgagcgggaga

SEQ ID NO: 6373 - DNA, 31 bp, Artificial Sequence
  Description of Artificial Sequence:  Enzymatic Nucleic Acid
gtccctggggctagctacaacgacatgcggg

SEQ ID NO: 6374 - DNA, 31 bp, Artificial Sequence
  Description of Artificial Sequence:  Enzymatic Nucleic Acid
gctgggggggctagctacaacgaccctggcc

SEQ ID NO: 6375 - DNA, 31 bp, Artificial Sequence
  Description of Artificial Sequence:  Enzymatic Nucleic Acid
acaaagcgggctagctacaacgatgggggtc

SEQ ID NO: 6376 - DNA, 31 bp, Artificial Sequence
  Description of Artificial Sequence:  Enzymatic Nucleic Acid
ccacaaagggctagctacaacgagctggggg

SEQ ID NO: 6377 - DNA, 31 bp, Artificial Sequence
  Description of Artificial Sequence:  Enzymatic Nucleic Acid
gatgaccaggctagctacaacgaaaagcgct

SEQ ID NO: 6378 - DNA, 31 bp, Artificial Sequence
  Description of Artificial Sequence:  Enzymatic Nucleic Acid
ctggatgaggctagctacaacgacacaaagc

SEQ ID NO: 6379 - DNA, 31 bp, Artificial Sequence
  Description of Artificial Sequence:  Enzymatic Nucleic Acid
attctggaggctagctacaacgagaccacaa

SEQ ID NO: 6380 - DNA, 31 bp, Artificial Sequence
  Description of Artificial Sequence:  Enzymatic Nucleic Acid
agtcctcaggctagctacaacgatctggatg

SEQ ID NO: 6381 - DNA, 31 bp, Artificial Sequence
  Description of Artificial Sequence:  Enzymatic Nucleic Acid
ggcccaagggctagctacaacgacctcattc

SEQ ID NO: 6382 - DNA, 31 bp, Artificial Sequence
  Description of Artificial Sequence:  Enzymatic Nucleic Acid
tggctgggggctagctacaacgaccaagtcc

SEQ ID NO: 6383 - DNA, 31 bp, Artificial Sequence
  Description of Artificial Sequence:  Enzymatic Nucleic Acid
gggactggggctagctacaacgatgggccca

SEQ ID NO: 6384 - DNA, 31 bp, Artificial Sequence
  Description of Artificial Sequence:  Enzymatic Nucleic Acid
ccaagggaggctagctacaacgatggctggg

SEQ ID NO: 6385 - DNA, 31 bp, Artificial Sequence
  Description of Artificial Sequence:  Enzymatic Nucleic Acid
aggtgctgggctagctacaacgaccaaggga

SEQ ID NO: 6386 - DNA, 31 bp, Artificial Sequence
  Description of Artificial Sequence:  Enzymatic Nucleic Acid
agaaggtgggctagctacaacgatgtccaag

SEQ ID NO: 6387 - DNA, 31 bp, Artificial Sequence
  Description of Artificial Sequence:  Enzymatic Nucleic Acid
gtagaaggggctagctacaacgagctgtcca

SEQ ID NO: 6388 - DNA, 31 bp, Artificial Sequence
  Description of Artificial Sequence:  Enzymatic Nucleic Acid
gtgagcggggctagctacaacgaagaaggtg

SEQ ID NO: 6389 - DNA, 31 bp, Artificial Sequence
  Description of Artificial Sequence:  Enzymatic Nucleic Acid
gcagtgagggctagctacaacgaggtagaag

SEQ ID NO: 6390 - DNA, 31 bp, Artificial Sequence
  Description of Artificial Sequence:  Enzymatic Nucleic Acid
tccagcagggctagctacaacgagagcggta

SEQ ID NO: 6391 - DNA, 31 bp, Artificial Sequence
  Description of Artificial Sequence:  Enzymatic Nucleic Acid
tcctccagggctagctacaacgaagtgagcg

SEQ ID NO: 6392 - DNA, 31 bp, Artificial Sequence
  Description of Artificial Sequence:  Enzymatic Nucleic Acid
tgtcatcgggctagctacaacgacctccagc

SEQ ID NO: 6393 - DNA, 31 bp, Artificial Sequence
  Description of Artificial Sequence:  Enzymatic Nucleic Acid
ccatgtcaggctagctacaacgacgtcctcc

SEQ ID NO: 6394 - DNA, 31 bp, Artificial Sequence
  Description of Artificial Sequence:  Enzymatic Nucleic Acid
cccccatgggctagctacaacgacatcgtcc

SEQ ID NO: 6395 - DNA, 31 bp, Artificial Sequence
  Description of Artificial Sequence:  Enzymatic Nucleic Acid
gtcccccaggctagctacaacgagtcatcgt

SEQ ID NO: 6396 - DNA, 31 bp, Artificial Sequence
  Description of Artificial Sequence:  Enzymatic Nucleic Acid
ccaccaggggctagctacaacgacccccatg

SEQ ID NO: 6397 - DNA, 31 bp, Artificial Sequence
  Description of Artificial Sequence:  Enzymatic Nucleic Acid
agcatccaggctagctacaacgacaggtccc

SEQ ID NO: 6398 - DNA, 31 bp, Artificial Sequence
  Description of Artificial Sequence:  Enzymatic Nucleic Acid
cctcagcaggctagctacaacgaccaccagg

SEQ ID NO: 6399 - DNA, 31 bp, Artificial Sequence
  Description of Artificial Sequence:  Enzymatic Nucleic Acid
ctcctcagggctagctacaacgaatccacca

SEQ ID NO: 6400 - DNA, 31 bp, Artificial Sequence
  Description of Artificial Sequence:  Enzymatic Nucleic Acid
accagataggctagctacaacgatcctcagc

SEQ ID NO: 6401 - DNA, 31 bp, Artificial Sequence
  Description of Artificial Sequence:  Enzymatic Nucleic Acid
gtaccagaggctagctacaacgaactcctca

SEQ ID NO: 6402 - DNA, 31 bp, Artificial Sequence
  Description of Artificial Sequence:  Enzymatic Nucleic Acid
ctggggtaggctagctacaacgacagatact

SEQ ID NO: 6403 - DNA, 31 bp, Artificial Sequence
  Description of Artificial Sequence:  Enzymatic Nucleic Acid
tgctggggggctagctacaacgaaccagata

SEQ ID NO: 6404 - DNA, 31 bp, Artificial Sequence
  Description of Artificial Sequence:  Enzymatic Nucleic Acid
aagccctgggctagctacaacgatggggtac

SEQ ID NO: 6405 - DNA, 31 bp, Artificial Sequence
  Description of Artificial Sequence:  Enzymatic Nucleic Acid
agaagaagggctagctacaacgacctgctgg

SEQ ID NO: 6406 - DNA, 31 bp, Artificial Sequence
  Description of Artificial Sequence:  Enzymatic Nucleic Acid
ggtctggaggctagctacaacgaagaagaag

SEQ ID NO: 6407 - DNA, 31 bp, Artificial Sequence
  Description of Artificial Sequence:  Enzymatic Nucleic Acid
gggcagggggctagctacaacgactggacag

SEQ ID NO: 6408 - DNA, 31 bp, Artificial Sequence
  Description of Artificial Sequence:  Enzymatic Nucleic Acid
gcccggggggctagctacaacgaagggtctg

SEQ ID NO: 6409 - DNA, 31 bp, Artificial Sequence
  Description of Artificial Sequence:  Enzymatic Nucleic Acid
ccccagcgggctagctacaacgaccggggca

SEQ ID NO: 6410 - DNA, 31 bp, Artificial Sequence
  Description of Artificial Sequence:  Enzymatic Nucleic Acid
gcccccagggctagctacaacgagcccgggg

SEQ ID NO: 6411 - DNA, 31 bp, Artificial Sequence
  Description of Artificial Sequence:  Enzymatic Nucleic Acid
ggaccatgggctagctacaacgaccccagcg

SEQ ID NO: 6412 - DNA, 31 bp, Artificial Sequence
  Description of Artificial Sequence:  Enzymatic Nucleic Acid
gtggaccaggctagctacaacgagcccccag

SEQ ID NO: 6413 - DNA, 31 bp, Artificial Sequence
  Description of Artificial Sequence:  Enzymatic Nucleic Acid
gtggtggaggctagctacaacgacatgcccc

SEQ ID NO: 6414 - DNA, 31 bp, Artificial Sequence
  Description of Artificial Sequence:  Enzymatic Nucleic Acid
gcctgtggggctagctacaacgaggaccatg

SEQ ID NO: 6415 - DNA, 31 bp, Artificial Sequence
  Description of Artificial Sequence:  Enzymatic Nucleic Acid
ggtgcctgggctagctacaacgaggtggacc

SEQ ID NO: 6416 - DNA, 31 bp, Artificial Sequence
  Description of Artificial Sequence:  Enzymatic Nucleic Acid
ctgcggtgggctagctacaacgactgtggtg

SEQ ID NO: 6417 - DNA, 31 bp, Artificial Sequence
  Description of Artificial Sequence:  Enzymatic Nucleic Acid
agctgcggggctagctacaacgagcctgtgg

SEQ ID NO: 6418 - DNA, 31 bp, Artificial Sequence
  Description of Artificial Sequence:  Enzymatic Nucleic Acid
atgagctgggctagctacaacgaggtgcctg

SEQ ID NO: 6419 - DNA, 31 bp, Artificial Sequence
  Description of Artificial Sequence:  Enzymatic Nucleic Acid
tagatgagggctagctacaacgatgcggtgc

SEQ ID NO: 6420 - DNA, 31 bp, Artificial Sequence
  Description of Artificial Sequence:  Enzymatic Nucleic Acid
ctggtagaggctagctacaacgagagctgcg

SEQ ID NO: 6421 - DNA, 31 bp, Artificial Sequence
  Description of Artificial Sequence:  Enzymatic Nucleic Acid
actcctggggctagctacaacgaagatgagc

SEQ ID NO: 6422 - DNA, 31 bp, Artificial Sequence
  Description of Artificial Sequence:  Enzymatic Nucleic Acid
caccgccaggctagctacaacgatcctggta

SEQ ID NO: 6423 - DNA, 31 bp, Artificial Sequence
  Description of Artificial Sequence:  Enzymatic Nucleic Acid
ccccaccgggctagctacaacgacactcctg

SEQ ID NO: 6424 - DNA, 31 bp, Artificial Sequence
  Description of Artificial Sequence:  Enzymatic Nucleic Acid
ggtccccaggctagctacaacgacgccactc

SEQ ID NO: 6425 - DNA, 31 bp, Artificial Sequence
  Description of Artificial Sequence:  Enzymatic Nucleic Acid
gtgtcaggggctagctacaacgaccccaccg

SEQ ID NO: 6426 - DNA, 31 bp, Artificial Sequence
  Description of Artificial Sequence:  Enzymatic Nucleic Acid
ccctagtgggctagctacaacgacaggtccc

SEQ ID NO: 6427 - DNA, 31 bp, Artificial Sequence
  Description of Artificial Sequence:  Enzymatic Nucleic Acid
agccctagggctagctacaacgagtcaggtc

SEQ ID NO: 6428 - DNA, 31 bp, Artificial Sequence
  Description of Artificial Sequence:  Enzymatic Nucleic Acid
ggctccagggctagctacaacgacctagtgt

SEQ ID NO: 6429 - DNA, 31 bp, Artificial Sequence
  Description of Artificial Sequence:  Enzymatic Nucleic Acid
tcagagggggctagctacaacgatccagccc

SEQ ID NO: 6430 - DNA, 31 bp, Artificial Sequence
  Description of Artificial Sequence:  Enzymatic Nucleic Acid
cctgggggggctagctacaacgactcctctt

SEQ ID NO: 6431 - DNA, 31 bp, Artificial Sequence
  Description of Artificial Sequence:  Enzymatic Nucleic Acid
agtggagaggctagctacaacgactgggggc

SEQ ID NO: 6432 - DNA, 31 bp, Artificial Sequence
  Description of Artificial Sequence:  Enzymatic Nucleic Acid
ggtgccagggctagctacaacgaggagacct

SEQ ID NO: 6433 - DNA, 31 bp, Artificial Sequence
  Description of Artificial Sequence:  Enzymatic Nucleic Acid
ggagggtgggctagctacaacgacagtggag

SEQ ID NO: 6434 - DNA, 31 bp, Artificial Sequence
  Description of Artificial Sequence:  Enzymatic Nucleic Acid
tcggagggggctagctacaacgagccagtgg

SEQ ID NO: 6435 - DNA, 31 bp, Artificial Sequence
  Description of Artificial Sequence:  Enzymatic Nucleic Acid
ggagccagggctagctacaacgacccttcgg

SEQ ID NO: 6436 - DNA, 31 bp, Artificial Sequence
  Description of Artificial Sequence:  Enzymatic Nucleic Acid
catcggagggctagctacaacgacagcccct

SEQ ID NO: 6437 - DNA, 31 bp, Artificial Sequence
  Description of Artificial Sequence:  Enzymatic Nucleic Acid
caaatacaggctagctacaacgacggagcca

SEQ ID NO: 6438 - DNA, 31 bp, Artificial Sequence
  Description of Artificial Sequence:  Enzymatic Nucleic Acid
atcaaataggctagctacaacgaatcggagc

SEQ ID NO: 6439 - DNA, 31 bp, Artificial Sequence
  Description of Artificial Sequence:  Enzymatic Nucleic Acid
ccatcaaaggctagctacaacgaacatcgga

SEQ ID NO: 6440 - DNA, 31 bp, Artificial Sequence
  Description of Artificial Sequence:  Enzymatic Nucleic Acid
ggtcaccaggctagctacaacgacaaataca

SEQ ID NO: 6441 - DNA, 31 bp, Artificial Sequence
  Description of Artificial Sequence:  Enzymatic Nucleic Acid
ccaggtcaggctagctacaacgacatcaaat

SEQ ID NO: 6442 - DNA, 31 bp, Artificial Sequence
  Description of Artificial Sequence:  Enzymatic Nucleic Acid
ttcccaggggctagctacaacgacaccatca

SEQ ID NO: 6443 - DNA, 31 bp, Artificial Sequence
  Description of Artificial Sequence:  Enzymatic Nucleic Acid
tgcccccaggctagctacaacgatcccaggt

SEQ ID NO: 6444 - DNA, 31 bp, Artificial Sequence
  Description of Artificial Sequence:  Enzymatic Nucleic Acid
cttggctgggctagctacaacgaccccattc

SEQ ID NO: 6445 - DNA, 31 bp, Artificial Sequence
  Description of Artificial Sequence:  Enzymatic Nucleic Acid
ccccttggggctagctacaacgatgccccca

SEQ ID NO: 6446 - DNA, 31 bp, Artificial Sequence
  Description of Artificial Sequence:  Enzymatic Nucleic Acid
ctttgcagggctagctacaacgacccttggc

SEQ ID NO: 6447 - DNA, 31 bp, Artificial Sequence
  Description of Artificial Sequence:  Enzymatic Nucleic Acid
aggctttgggctagctacaacgaagcccctt

SEQ ID NO: 6448 - DNA, 31 bp, Artificial Sequence
  Description of Artificial Sequence:  Enzymatic Nucleic Acid
tggggaggggctagctacaacgatttgcagc

SEQ ID NO: 6449 - DNA, 31 bp, Artificial Sequence
  Description of Artificial Sequence:  Enzymatic Nucleic Acid
gtcatgtgggctagctacaacgaggggaggc

SEQ ID NO: 6450 - DNA, 31 bp, Artificial Sequence
  Description of Artificial Sequence:  Enzymatic Nucleic Acid
gggtcatgggctagctacaacgagtggggag

SEQ ID NO: 6451 - DNA, 31 bp, Artificial Sequence
  Description of Artificial Sequence:  Enzymatic Nucleic Acid
tggggtcaggctagctacaacgagtgtgggg

SEQ ID NO: 6452 - DNA, 31 bp, Artificial Sequence
  Description of Artificial Sequence:  Enzymatic Nucleic Acid
ggctggggggctagctacaacgacatgtgtg

SEQ ID NO: 6453 - DNA, 31 bp, Artificial Sequence
  Description of Artificial Sequence:  Enzymatic Nucleic Acid
gtagagggggctagctacaacgatggggtca

SEQ ID NO: 6454 - DNA, 31 bp, Artificial Sequence
  Description of Artificial Sequence:  Enzymatic Nucleic Acid
taccgctgggctagctacaacgaagagggct

SEQ ID NO: 6455 - DNA, 31 bp, Artificial Sequence
  Description of Artificial Sequence:  Enzymatic Nucleic Acid
ctgtaccgggctagctacaacgatgtagagg

SEQ ID NO: 6456 - DNA, 31 bp, Artificial Sequence
  Description of Artificial Sequence:  Enzymatic Nucleic Acid
tcactgtaggctagctacaacgacgctgtag

SEQ ID NO: 6457 - DNA, 31 bp, Artificial Sequence
  Description of Artificial Sequence:  Enzymatic Nucleic Acid
cctcactgggctagctacaacgaaccgctgt

SEQ ID NO: 6458 - DNA, 31 bp, Artificial Sequence
  Description of Artificial Sequence:  Enzymatic Nucleic Acid
ggtcctcaggctagctacaacgatgtaccgc

SEQ ID NO: 6459 - DNA, 31 bp, Artificial Sequence
  Description of Artificial Sequence:  Enzymatic Nucleic Acid
ctgtggggggctagctacaacgacctcactg

SEQ ID NO: 6460 - DNA, 31 bp, Artificial Sequence
  Description of Artificial Sequence:  Enzymatic Nucleic Acid
gggtactgggctagctacaacgaggggtcct

SEQ ID NO: 6461 - DNA, 31 bp, Artificial Sequence
  Description of Artificial Sequence:  Enzymatic Nucleic Acid
caggggtaggctagctacaacgatgtggggt

SEQ ID NO: 6462 - DNA, 31 bp, Artificial Sequence
  Description of Artificial Sequence:  Enzymatic Nucleic Acid
ggcaggggggctagctacaacgaactgtggg

SEQ ID NO: 6463 - DNA, 31 bp, Artificial Sequence
  Description of Artificial Sequence:  Enzymatic Nucleic Acid
tcagagggggctagctacaacgaaggggtac

SEQ ID NO: 6464 - DNA, 31 bp, Artificial Sequence
  Description of Artificial Sequence:  Enzymatic Nucleic Acid
gccatcagggctagctacaacgactcagagg

SEQ ID NO: 6465 - DNA, 31 bp, Artificial Sequence
  Description of Artificial Sequence:  Enzymatic Nucleic Acid
cgtagccaggctagctacaacgacagtctca

SEQ ID NO: 6466 - DNA, 31 bp, Artificial Sequence
  Description of Artificial Sequence:  Enzymatic Nucleic Acid
caacgtagggctagctacaacgacatcagtc

SEQ ID NO: 6467 - DNA, 31 bp, Artificial Sequence
  Description of Artificial Sequence:  Enzymatic Nucleic Acid
gggcaacgggctagctacaacgaagccatca

SEQ ID NO: 6468 - DNA, 31 bp, Artificial Sequence
  Description of Artificial Sequence:  Enzymatic Nucleic Acid
gggggcaaggctagctacaacgagtagccat

SEQ ID NO: 6469 - DNA, 31 bp, Artificial Sequence
  Description of Artificial Sequence:  Enzymatic Nucleic Acid
caggggggggctagctacaacgaaacgtagc

SEQ ID NO: 6470 - DNA, 31 bp, Artificial Sequence
  Description of Artificial Sequence:  Enzymatic Nucleic Acid
gctgcaggggctagctacaacgacagggggg

SEQ ID NO: 6471 - DNA, 31 bp, Artificial Sequence
  Description of Artificial Sequence:  Enzymatic Nucleic Acid
gggggctgggctagctacaacgaaggtcagg

SEQ ID NO: 6472 - DNA, 31 bp, Artificial Sequence
  Description of Artificial Sequence:  Enzymatic Nucleic Acid
gctgggggggctagctacaacgatgcaggtc

SEQ ID NO: 6473 - DNA, 31 bp, Artificial Sequence
  Description of Artificial Sequence:  Enzymatic Nucleic Acid
tattcaggggctagctacaacgatgggggct

SEQ ID NO: 6474 - DNA, 31 bp, Artificial Sequence
  Description of Artificial Sequence:  Enzymatic Nucleic Acid
ttcacataggctagctacaacgatcaggctg

SEQ ID NO: 6475 - DNA, 31 bp, Artificial Sequence
  Description of Artificial Sequence:  Enzymatic Nucleic Acid
ggttcacaggctagctacaacgaattcaggc

SEQ ID NO: 6476 - DNA, 31 bp, Artificial Sequence
  Description of Artificial Sequence:  Enzymatic Nucleic Acid
ctggttcaggctagctacaacgaatattcag

SEQ ID NO: 6477 - DNA, 31 bp, Artificial Sequence
  Description of Artificial Sequence:  Enzymatic Nucleic Acid
ctggctggggctagctacaacgatcacatat

SEQ ID NO: 6478 - DNA, 31 bp, Artificial Sequence
  Description of Artificial Sequence:  Enzymatic Nucleic Acid
acatctggggctagctacaacgatggttcac

SEQ ID NO: 6479 - DNA, 31 bp, Artificial Sequence
  Description of Artificial Sequence:  Enzymatic Nucleic Acid
gccgaacaggctagctacaacgactggctgg

SEQ ID NO: 6480 - DNA, 31 bp, Artificial Sequence
  Description of Artificial Sequence:  Enzymatic Nucleic Acid
gggccgaaggctagctacaacgaatctggct

SEQ ID NO: 6481 - DNA, 31 bp, Artificial Sequence
  Description of Artificial Sequence:  Enzymatic Nucleic Acid
ggctggggggctagctacaacgacgaacatc

SEQ ID NO: 6482 - DNA, 31 bp, Artificial Sequence
  Description of Artificial Sequence:  Enzymatic Nucleic Acid
gaagggggggctagctacaacgatggggccg

SEQ ID NO: 6483 - DNA, 31 bp, Artificial Sequence
  Description of Artificial Sequence:  Enzymatic Nucleic Acid
tctcggggggctagctacaacgagaaggggg

SEQ ID NO: 6484 - DNA, 31 bp, Artificial Sequence
  Description of Artificial Sequence:  Enzymatic Nucleic Acid
gcagagggggctagctacaacgacctctcgg

SEQ ID NO: 6485 - DNA, 31 bp, Artificial Sequence
  Description of Artificial Sequence:  Enzymatic Nucleic Acid
gcagcaggggctagctacaacgaagagggcc

SEQ ID NO: 6486 - DNA, 31 bp, Artificial Sequence
  Description of Artificial Sequence:  Enzymatic Nucleic Acid
tcgggcagggctagctacaacgaaggcagag

SEQ ID NO: 6487 - DNA, 31 bp, Artificial Sequence
  Description of Artificial Sequence:  Enzymatic Nucleic Acid
aggtcgggggctagctacaacgaagcaggca

SEQ ID NO: 6488 - DNA, 31 bp, Artificial Sequence
  Description of Artificial Sequence:  Enzymatic Nucleic Acid
ccagcaggggctagctacaacgacgggcagc

SEQ ID NO: 6489 - DNA, 31 bp, Artificial Sequence
  Description of Artificial Sequence:  Enzymatic Nucleic Acid
ggcaccagggctagctacaacgaaggtcggg

SEQ ID NO: 6490 - DNA, 31 bp, Artificial Sequence
  Description of Artificial Sequence:  Enzymatic Nucleic Acid
gagtggcaggctagctacaacgacagcaggt

SEQ ID NO: 6491 - DNA, 31 bp, Artificial Sequence
  Description of Artificial Sequence:  Enzymatic Nucleic Acid
cagagtggggctagctacaacgaaccagcag

SEQ ID NO: 6492 - DNA, 31 bp, Artificial Sequence
  Description of Artificial Sequence:  Enzymatic Nucleic Acid
ttccagagggctagctacaacgaggcaccag

SEQ ID NO: 6493 - DNA, 31 bp, Artificial Sequence
  Description of Artificial Sequence:  Enzymatic Nucleic Acid
gtcttgggggctagctacaacgactttccag

SEQ ID NO: 6494 - DNA, 31 bp, Artificial Sequence
  Description of Artificial Sequence:  Enzymatic Nucleic Acid
ggagagagggctagctacaacgacttgggcc

SEQ ID NO: 6495 - DNA, 31 bp, Artificial Sequence
  Description of Artificial Sequence:  Enzymatic Nucleic Acid
cgaccccaggctagctacaacgatcttccct

SEQ ID NO: 6496 - DNA, 31 bp, Artificial Sequence
  Description of Artificial Sequence:  Enzymatic Nucleic Acid
tttgacgaggctagctacaacgacccattct

SEQ ID NO: 6497 - DNA, 31 bp, Artificial Sequence
  Description of Artificial Sequence:  Enzymatic Nucleic Acid
gtctttgaggctagctacaacgagaccccat

SEQ ID NO: 6498 - DNA, 31 bp, Artificial Sequence
  Description of Artificial Sequence:  Enzymatic Nucleic Acid
caaaaacgggctagctacaacgactttgacg

SEQ ID NO: 6499 - DNA, 31 bp, Artificial Sequence
  Description of Artificial Sequence:  Enzymatic Nucleic Acid
ggcaaaaaggctagctacaacgagtctttga

SEQ ID NO: 6500 - DNA, 31 bp, Artificial Sequence
  Description of Artificial Sequence:  Enzymatic Nucleic Acid
cccaaaggggctagctacaacgaaaaaacgt

SEQ ID NO: 6501 - DNA, 31 bp, Artificial Sequence
  Description of Artificial Sequence:  Enzymatic Nucleic Acid
ccacggcaggctagctacaacgaccccaaag

SEQ ID NO: 6502 - DNA, 31 bp, Artificial Sequence
  Description of Artificial Sequence:  Enzymatic Nucleic Acid
ctccacggggctagctacaacgaacccccaa

SEQ ID NO: 6503 - DNA, 31 bp, Artificial Sequence
  Description of Artificial Sequence:  Enzymatic Nucleic Acid
gttctccaggctagctacaacgaggcacccc

SEQ ID NO: 6504 - DNA, 31 bp, Artificial Sequence
  Description of Artificial Sequence:  Enzymatic Nucleic Acid
actcggggggctagctacaacgatctccacg

SEQ ID NO: 6505 - DNA, 31 bp, Artificial Sequence
  Description of Artificial Sequence:  Enzymatic Nucleic Acid
gtcaagtaggctagctacaacgatcggggtt

SEQ ID NO: 6506 - DNA, 31 bp, Artificial Sequence
  Description of Artificial Sequence:  Enzymatic Nucleic Acid
gtgtcaagggctagctacaacgaactcgggg

SEQ ID NO: 6507 - DNA, 31 bp, Artificial Sequence
  Description of Artificial Sequence:  Enzymatic Nucleic Acid
ctggggtgggctagctacaacgacaagtact

SEQ ID NO: 6508 - DNA, 31 bp, Artificial Sequence
  Description of Artificial Sequence:  Enzymatic Nucleic Acid
ccctggggggctagctacaacgagtcaagta

SEQ ID NO: 6509 - DNA, 31 bp, Artificial Sequence
  Description of Artificial Sequence:  Enzymatic Nucleic Acid
aggggcagggctagctacaacgatcctccct

SEQ ID NO: 6510 - DNA, 31 bp, Artificial Sequence
  Description of Artificial Sequence:  Enzymatic Nucleic Acid
ctgaggggggctagctacaacgaagctcctc

SEQ ID NO: 6511 - DNA, 31 bp, Artificial Sequence
  Description of Artificial Sequence:  Enzymatic Nucleic Acid
gggtggggggctagctacaacgatgaggggc

SEQ ID NO: 6512 - DNA, 31 bp, Artificial Sequence
  Description of Artificial Sequence:  Enzymatic Nucleic Acid
gaggagggggctagctacaacgaggggctga

SEQ ID NO: 6513 - DNA, 31 bp, Artificial Sequence
  Description of Artificial Sequence:  Enzymatic Nucleic Acid
gctgaaggggctagctacaacgaaggaggag

SEQ ID NO: 6514 - DNA, 31 bp, Artificial Sequence
  Description of Artificial Sequence:  Enzymatic Nucleic Acid
aggctgggggctagctacaacgatgaaggca

SEQ ID NO: 6515 - DNA, 31 bp, Artificial Sequence
  Description of Artificial Sequence:  Enzymatic Nucleic Acid
gtcgaaggggctagctacaacgatgggctga

SEQ ID NO: 6516 - DNA, 31 bp, Artificial Sequence
  Description of Artificial Sequence:  Enzymatic Nucleic Acid
agaggttgggctagctacaacgacgaaggct

SEQ ID NO: 6517 - DNA, 31 bp, Artificial Sequence
  Description of Artificial Sequence:  Enzymatic Nucleic Acid
aatagaggggctagctacaacgatgtcgaag

SEQ ID NO: 6518 - DNA, 31 bp, Artificial Sequence
  Description of Artificial Sequence:  Enzymatic Nucleic Acid
cccagtaaggctagctacaacgaagaggttg

SEQ ID NO: 6519 - DNA, 31 bp, Artificial Sequence
  Description of Artificial Sequence:  Enzymatic Nucleic Acid
ggtcccagggctagctacaacgaaatagagg

SEQ ID NO: 6520 - DNA, 31 bp, Artificial Sequence
  Description of Artificial Sequence:  Enzymatic Nucleic Acid
ggtcctggggctagctacaacgacccagtaa

SEQ ID NO: 6521 - DNA, 31 bp, Artificial Sequence
  Description of Artificial Sequence:  Enzymatic Nucleic Acid
ctggtgggggctagctacaacgacctggtcc

SEQ ID NO: 6522 - DNA, 31 bp, Artificial Sequence
  Description of Artificial Sequence:  Enzymatic Nucleic Acid
cgctctggggctagctacaacgagggtcctg

SEQ ID NO: 6523 - DNA, 31 bp, Artificial Sequence
  Description of Artificial Sequence:  Enzymatic Nucleic Acid
gccccccgggctagctacaacgatctggtgg

SEQ ID NO: 6524 - DNA, 31 bp, Artificial Sequence
  Description of Artificial Sequence:  Enzymatic Nucleic Acid
gggtggagggctagctacaacgacccccgct

SEQ ID NO: 6525 - DNA, 31 bp, Artificial Sequence
  Description of Artificial Sequence:  Enzymatic Nucleic Acid
gtgctgggggctagctacaacgaggagcccc

SEQ ID NO: 6526 - DNA, 31 bp, Artificial Sequence
  Description of Artificial Sequence:  Enzymatic Nucleic Acid
tgaaggtgggctagctacaacgatgggtgga

SEQ ID NO: 6527 - DNA, 31 bp, Artificial Sequence
  Description of Artificial Sequence:  Enzymatic Nucleic Acid
tttgaaggggctagctacaacgagctgggtg

SEQ ID NO: 6528 - DNA, 31 bp, Artificial Sequence
  Description of Artificial Sequence:  Enzymatic Nucleic Acid
cgtaggtgggctagctacaacgaccctttga

SEQ ID NO: 6529 - DNA, 31 bp, Artificial Sequence
  Description of Artificial Sequence:  Enzymatic Nucleic Acid
gccgtaggggctagctacaacgagtcccttt

SEQ ID NO: 6530 - DNA, 31 bp, Artificial Sequence
  Description of Artificial Sequence:  Enzymatic Nucleic Acid
ctctgccgggctagctacaacgaaggtgtcc

SEQ ID NO: 6531 - DNA, 31 bp, Artificial Sequence
  Description of Artificial Sequence:  Enzymatic Nucleic Acid
gttctctgggctagctacaacgacgtaggtg

SEQ ID NO: 6532 - DNA, 31 bp, Artificial Sequence
  Description of Artificial Sequence:  Enzymatic Nucleic Acid
actctgggggctagctacaacgatctctgcc

SEQ ID NO: 6533 - DNA, 31 bp, Artificial Sequence
  Description of Artificial Sequence:  Enzymatic Nucleic Acid
cccaggtaggctagctacaacgatctgggtt

SEQ ID NO: 6534 - DNA, 31 bp, Artificial Sequence
  Description of Artificial Sequence:  Enzymatic Nucleic Acid
gacccaggggctagctacaacgaactctggg

SEQ ID NO: 6535 - DNA, 31 bp, Artificial Sequence
  Description of Artificial Sequence:  Enzymatic Nucleic Acid
cgtccagaggctagctacaacgaccaggtac

SEQ ID NO: 6536 - DNA, 31 bp, Artificial Sequence
  Description of Artificial Sequence:  Enzymatic Nucleic Acid
ctggcacgggctagctacaacgaccagaccc

SEQ ID NO: 6537 - DNA, 31 bp, Artificial Sequence
  Description of Artificial Sequence:  Enzymatic Nucleic Acid
cactggcaggctagctacaacgagtccagac

SEQ ID NO: 6538 - DNA, 31 bp, Artificial Sequence
  Description of Artificial Sequence:  Enzymatic Nucleic Acid
cacactggggctagctacaacgaacgtccag

SEQ ID NO: 6539 - DNA, 31 bp, Artificial Sequence
  Description of Artificial Sequence:  Enzymatic Nucleic Acid
ggttcacaggctagctacaacgatggcacgt

SEQ ID NO: 6540 - DNA, 31 bp, Artificial Sequence
  Description of Artificial Sequence:  Enzymatic Nucleic Acid
ctggttcaggctagctacaacgaactggcac

SEQ ID NO: 6541 - DNA, 31 bp, Artificial Sequence
  Description of Artificial Sequence:  Enzymatic Nucleic Acid
ccttctggggctagctacaacgatcacactg

SEQ ID NO: 6542 - DNA, 31 bp, Artificial Sequence
  Description of Artificial Sequence:  Enzymatic Nucleic Acid
ggacttggggctagctacaacgacttctggt

SEQ ID NO: 6543 - DNA, 31 bp, Artificial Sequence
  Description of Artificial Sequence:  Enzymatic Nucleic Acid
tctgcggaggctagctacaacgattggcctt

SEQ ID NO: 6544 - DNA, 31 bp, Artificial Sequence
  Description of Artificial Sequence:  Enzymatic Nucleic Acid
ggcttctgggctagctacaacgaggacttgg

SEQ ID NO: 6545 - DNA, 31 bp, Artificial Sequence
  Description of Artificial Sequence:  Enzymatic Nucleic Acid
catcagggggctagctacaacgattctgcgg

SEQ ID NO: 6546 - DNA, 31 bp, Artificial Sequence
  Description of Artificial Sequence:  Enzymatic Nucleic Acid
aggacacaggctagctacaacgacagggctt

SEQ ID NO: 6547 - DNA, 31 bp, Artificial Sequence
  Description of Artificial Sequence:  Enzymatic Nucleic Acid
tgaggacaggctagctacaacgaatcagggc

SEQ ID NO: 6548 - DNA, 31 bp, Artificial Sequence
  Description of Artificial Sequence:  Enzymatic Nucleic Acid
cctgaggaggctagctacaacgaacatcagg

SEQ ID NO: 6549 - DNA, 31 bp, Artificial Sequence
  Description of Artificial Sequence:  Enzymatic Nucleic Acid
cttccctgggctagctacaacgatccctgag

SEQ ID NO: 6550 - DNA, 31 bp, Artificial Sequence
  Description of Artificial Sequence:  Enzymatic Nucleic Acid
aagtcaggggctagctacaacgacttccctg

SEQ ID NO: 6551 - DNA, 31 bp, Artificial Sequence
  Description of Artificial Sequence:  Enzymatic Nucleic Acid
agcagaagggctagctacaacgacaggcctt

SEQ ID NO: 6552 - DNA, 31 bp, Artificial Sequence
  Description of Artificial Sequence:  Enzymatic Nucleic Acid
gatgccagggctagctacaacgaagaagtca

SEQ ID NO: 6553 - DNA, 31 bp, Artificial Sequence
  Description of Artificial Sequence:  Enzymatic Nucleic Acid
tcttgatgggctagctacaacgacagcagaa

SEQ ID NO: 6554 - DNA, 31 bp, Artificial Sequence
  Description of Artificial Sequence:  Enzymatic Nucleic Acid
cctcttgaggctagctacaacgagccagcag

SEQ ID NO: 6555 - DNA, 31 bp, Artificial Sequence
  Description of Artificial Sequence:  Enzymatic Nucleic Acid
ccctcccaggctagctacaacgactcttgat

SEQ ID NO: 6556 - DNA, 31 bp, Artificial Sequence
  Description of Artificial Sequence:  Enzymatic Nucleic Acid
tcggagggggctagctacaacgacctcccac

SEQ ID NO: 6557 - DNA, 31 bp, Artificial Sequence
  Description of Artificial Sequence:  Enzymatic Nucleic Acid
ggaagtggggctagctacaacgacggagggc

SEQ ID NO: 6558 - DNA, 31 bp, Artificial Sequence
  Description of Artificial Sequence:  Enzymatic Nucleic Acid
cctggaagggctagctacaacgaggtcggag

SEQ ID NO: 6559 - DNA, 31 bp, Artificial Sequence
  Description of Artificial Sequence:  Enzymatic Nucleic Acid
atggcaggggctagctacaacgatcccctgg

SEQ ID NO: 6560 - DNA, 31 bp, Artificial Sequence
  Description of Artificial Sequence:  Enzymatic Nucleic Acid
tggcatggggctagctacaacgaaggttccc

SEQ ID NO: 6561 - DNA, 31 bp, Artificial Sequence
  Description of Artificial Sequence:  Enzymatic Nucleic Acid
tcctggcaggctagctacaacgaggcaggtt

SEQ ID NO: 6562 - DNA, 31 bp, Artificial Sequence
  Description of Artificial Sequence:  Enzymatic Nucleic Acid
gttcctggggctagctacaacgaatggcagg

SEQ ID NO: 6563 - DNA, 31 bp, Artificial Sequence
  Description of Artificial Sequence:  Enzymatic Nucleic Acid
aggacaggggctagctacaacgatcctggca

SEQ ID NO: 6564 - DNA, 31 bp, Artificial Sequence
  Description of Artificial Sequence:  Enzymatic Nucleic Acid
ccttaggaggctagctacaacgaaggttcct

SEQ ID NO: 6565 - DNA, 31 bp, Artificial Sequence
  Description of Artificial Sequence:  Enzymatic Nucleic Acid
aaggaaggggctagctacaacgatccttagg

SEQ ID NO: 6566 - DNA, 31 bp, Artificial Sequence
  Description of Artificial Sequence:  Enzymatic Nucleic Acid
aactcaagggctagctacaacgaaggaagga

SEQ ID NO: 6567 - DNA, 31 bp, Artificial Sequence
  Description of Artificial Sequence:  Enzymatic Nucleic Acid
tctgggaaggctagctacaacgatcaagcag

SEQ ID NO: 6568 - DNA, 31 bp, Artificial Sequence
  Description of Artificial Sequence:  Enzymatic Nucleic Acid
tccagccaggctagctacaacgactgggaac

SEQ ID NO: 6569 - DNA, 31 bp, Artificial Sequence
  Description of Artificial Sequence:  Enzymatic Nucleic Acid
ccttccagggctagctacaacgacatctggg

SEQ ID NO: 6570 - DNA, 31 bp, Artificial Sequence
  Description of Artificial Sequence:  Enzymatic Nucleic Acid
aggctggaggctagctacaacgacccttcca

SEQ ID NO: 6571 - DNA, 31 bp, Artificial Sequence
  Description of Artificial Sequence:  Enzymatic Nucleic Acid
caacgaggggctagctacaacgatggacccc

SEQ ID NO: 6572 - DNA, 31 bp, Artificial Sequence
  Description of Artificial Sequence:  Enzymatic Nucleic Acid
tcttccaaggctagctacaacgagaggctgg

SEQ ID NO: 6573 - DNA, 31 bp, Artificial Sequence
  Description of Artificial Sequence:  Enzymatic Nucleic Acid
cagtgctgggctagctacaacgatcctcttc

SEQ ID NO: 6574 - DNA, 31 bp, Artificial Sequence
  Description of Artificial Sequence:  Enzymatic Nucleic Acid
ccccagtgggctagctacaacgatgttcctc

SEQ ID NO: 6575 - DNA, 31 bp, Artificial Sequence
  Description of Artificial Sequence:  Enzymatic Nucleic Acid
ctccccagggctagctacaacgagctgttcc

SEQ ID NO: 6576 - DNA, 31 bp, Artificial Sequence
  Description of Artificial Sequence:  Enzymatic Nucleic Acid
cacaaagaggctagctacaacgatccccagt

SEQ ID NO: 6577 - DNA, 31 bp, Artificial Sequence
  Description of Artificial Sequence:  Enzymatic Nucleic Acid
agaatccaggctagctacaacgaaaagactc

SEQ ID NO: 6578 - DNA, 31 bp, Artificial Sequence
  Description of Artificial Sequence:  Enzymatic Nucleic Acid
cctcagaaggctagctacaacgaccacaaag

SEQ ID NO: 6579 - DNA, 31 bp, Artificial Sequence
  Description of Artificial Sequence:  Enzymatic Nucleic Acid
gggcagggggctagctacaacgactcagaat

SEQ ID NO: 6580 - DNA, 31 bp, Artificial Sequence
  Description of Artificial Sequence:  Enzymatic Nucleic Acid
tcattgggggctagctacaacgaagggcctc

SEQ ID NO: 6581 - DNA, 31 bp, Artificial Sequence
  Description of Artificial Sequence:  Enzymatic Nucleic Acid
gagtctcaggctagctacaacgatgggcagg

SEQ ID NO: 6582 - DNA, 31 bp, Artificial Sequence
  Description of Artificial Sequence:  Enzymatic Nucleic Acid
ccctagagggctagctacaacgactcattgg

SEQ ID NO: 6583 - DNA, 31 bp, Artificial Sequence
  Description of Artificial Sequence:  Enzymatic Nucleic Acid
ccactggaggctagctacaacgacctagagt

SEQ ID NO: 6584 - DNA, 31 bp, Artificial Sequence
  Description of Artificial Sequence:  Enzymatic Nucleic Acid
ggcatccaggctagctacaacgatggaccct

SEQ ID NO: 6585 - DNA, 31 bp, Artificial Sequence
  Description of Artificial Sequence:  Enzymatic Nucleic Acid
ctgtggcaggctagctacaacgaccactgga

SEQ ID NO: 6586 - DNA, 31 bp, Artificial Sequence
  Description of Artificial Sequence:  Enzymatic Nucleic Acid
ggctgtggggctagctacaacgaatccactg

SEQ ID NO: 6587 - DNA, 31 bp, Artificial Sequence
  Description of Artificial Sequence:  Enzymatic Nucleic Acid
ctgggctgggctagctacaacgaggcatcca

SEQ ID NO: 6588 - DNA, 31 bp, Artificial Sequence
  Description of Artificial Sequence:  Enzymatic Nucleic Acid
aagctgggggctagctacaacgatgtggcat

SEQ ID NO: 6589 - DNA, 31 bp, Artificial Sequence
  Description of Artificial Sequence:  Enzymatic Nucleic Acid
gggccaagggctagctacaacgatgggctgt

SEQ ID NO: 6590 - DNA, 31 bp, Artificial Sequence
  Description of Artificial Sequence:  Enzymatic Nucleic Acid
ggaaagggggctagctacaacgacaagctgg

SEQ ID NO: 6591 - DNA, 31 bp, Artificial Sequence
  Description of Artificial Sequence:  Enzymatic Nucleic Acid
acccaggaggctagctacaacgactggaagg

SEQ ID NO: 6592 - DNA, 31 bp, Artificial Sequence
  Description of Artificial Sequence:  Enzymatic Nucleic Acid
tttcagtaggctagctacaacgaccaggatc

SEQ ID NO: 6593 - DNA, 31 bp, Artificial Sequence
  Description of Artificial Sequence:  Enzymatic Nucleic Acid
gctttcagggctagctacaacgaacccagga

SEQ ID NO: 6594 - DNA, 31 bp, Artificial Sequence
  Description of Artificial Sequence:  Enzymatic Nucleic Acid
ccctaaggggctagctacaacgatttcagta

SEQ ID NO: 6595 - DNA, 31 bp, Artificial Sequence
  Description of Artificial Sequence:  Enzymatic Nucleic Acid
caggccagggctagctacaacgattccctaa

SEQ ID NO: 6596 - DNA, 31 bp, Artificial Sequence
  Description of Artificial Sequence:  Enzymatic Nucleic Acid
ctctcaggggctagctacaacgacagcttcc

SEQ ID NO: 6597 - DNA, 31 bp, Artificial Sequence
  Description of Artificial Sequence:  Enzymatic Nucleic Acid
tagggccgggctagctacaacgattcccctc

SEQ ID NO: 6598 - DNA, 31 bp, Artificial Sequence
  Description of Artificial Sequence:  Enzymatic Nucleic Acid
ccttagggggctagctacaacgacgcttccc

SEQ ID NO: 6599 - DNA, 31 bp, Artificial Sequence
  Description of Artificial Sequence:  Enzymatic Nucleic Acid
cttagacaggctagctacaacgatcccttag

SEQ ID NO: 6600 - DNA, 31 bp, Artificial Sequence
  Description of Artificial Sequence:  Enzymatic Nucleic Acid
ttcttagaggctagctacaacgaactccctt

SEQ ID NO: 6601 - DNA, 31 bp, Artificial Sequence
  Description of Artificial Sequence:  Enzymatic Nucleic Acid
cgcttttgggctagctacaacgatcttagac

SEQ ID NO: 6602 - DNA, 31 bp, Artificial Sequence
  Description of Artificial Sequence:  Enzymatic Nucleic Acid
atgggtcgggctagctacaacgattttgttc

SEQ ID NO: 6603 - DNA, 31 bp, Artificial Sequence
  Description of Artificial Sequence:  Enzymatic Nucleic Acid
tgaatgggggctagctacaacgacgcttttg

SEQ ID NO: 6604 - DNA, 31 bp, Artificial Sequence
  Description of Artificial Sequence:  Enzymatic Nucleic Acid
tctctgaaggctagctacaacgagggtcgct

SEQ ID NO: 6605 - DNA, 31 bp, Artificial Sequence
  Description of Artificial Sequence:  Enzymatic Nucleic Acid
agggacagggctagctacaacgactctgaat

SEQ ID NO: 6606 - DNA, 31 bp, Artificial Sequence
  Description of Artificial Sequence:  Enzymatic Nucleic Acid
ttcagggaggctagctacaacgaagtctctg

SEQ ID NO: 6607 - DNA, 31 bp, Artificial Sequence
  Description of Artificial Sequence:  Enzymatic Nucleic Acid
gtactaggggctagctacaacgattcaggga

SEQ ID NO: 6608 - DNA, 31 bp, Artificial Sequence
  Description of Artificial Sequence:  Enzymatic Nucleic Acid
gggcagtaggctagctacaacgataggtttc

SEQ ID NO: 6609 - DNA, 31 bp, Artificial Sequence
  Description of Artificial Sequence:  Enzymatic Nucleic Acid
gggggcagggctagctacaacgaactaggtt

SEQ ID NO: 6610 - DNA, 31 bp, Artificial Sequence
  Description of Artificial Sequence:  Enzymatic Nucleic Acid
atggggggggctagctacaacgaagtactag

SEQ ID NO: 6611 - DNA, 31 bp, Artificial Sequence
  Description of Artificial Sequence:  Enzymatic Nucleic Acid
cttcctcaggctagctacaacgaggggggca

SEQ ID NO: 6612 - DNA, 31 bp, Artificial Sequence
  Description of Artificial Sequence:  Enzymatic Nucleic Acid
cattgctgggctagctacaacgatccttcct

SEQ ID NO: 6613 - DNA, 31 bp, Artificial Sequence
  Description of Artificial Sequence:  Enzymatic Nucleic Acid
caccattgggctagctacaacgatgttcctt

SEQ ID NO: 6614 - DNA, 31 bp, Artificial Sequence
  Description of Artificial Sequence:  Enzymatic Nucleic Acid
tgacaccaggctagctacaacgatgctgttc

SEQ ID NO: 6615 - DNA, 31 bp, Artificial Sequence
  Description of Artificial Sequence:  Enzymatic Nucleic Acid
tactgacaggctagctacaacgacattgctg

SEQ ID NO: 6616 - DNA, 31 bp, Artificial Sequence
  Description of Artificial Sequence:  Enzymatic Nucleic Acid
gatactgaggctagctacaacgaaccattgc

SEQ ID NO: 6617 - DNA, 31 bp, Artificial Sequence
  Description of Artificial Sequence:  Enzymatic Nucleic Acid
cctggataggctagctacaacgatgacacca

SEQ ID NO: 6618 - DNA, 31 bp, Artificial Sequence
  Description of Artificial Sequence:  Enzymatic Nucleic Acid
agcctggaggctagctacaacgaactgacac

SEQ ID NO: 6619 - DNA, 31 bp, Artificial Sequence
  Description of Artificial Sequence:  Enzymatic Nucleic Acid
gtacaaagggctagctacaacgactggatac

SEQ ID NO: 6620 - DNA, 31 bp, Artificial Sequence
  Description of Artificial Sequence:  Enzymatic Nucleic Acid
actctgtaggctagctacaacgaaaagcctg

SEQ ID NO: 6621 - DNA, 31 bp, Artificial Sequence
  Description of Artificial Sequence:  Enzymatic Nucleic Acid
gcactctgggctagctacaacgaacaaagcc

SEQ ID NO: 6622 - DNA, 31 bp, Artificial Sequence
  Description of Artificial Sequence:  Enzymatic Nucleic Acid
gaaaagcaggctagctacaacgatctgtaca

SEQ ID NO: 6623 - DNA, 31 bp, Artificial Sequence
  Description of Artificial Sequence:  Enzymatic Nucleic Acid
cagaaaagggctagctacaacgaactctgta

SEQ ID NO: 6624 - DNA, 31 bp, Artificial Sequence
  Description of Artificial Sequence:  Enzymatic Nucleic Acid
aaactaaaggctagctacaacgaagaaaagc

SEQ ID NO: 6625 - DNA, 31 bp, Artificial Sequence
  Description of Artificial Sequence:  Enzymatic Nucleic Acid
agtaaaaaggctagctacaacgataaacaga

SEQ ID NO: 6626 - DNA, 31 bp, Artificial Sequence
  Description of Artificial Sequence:  Enzymatic Nucleic Acid
aaaaaaagggctagctacaacgaaaaaacta

SEQ ID NO: 6627 - DNA, 31 bp, Artificial Sequence
  Description of Artificial Sequence:  Enzymatic Nucleic Acid
aaacaaaaggctagctacaacgaaaaaaaag

SEQ ID NO: 6628 - DNA, 31 bp, Artificial Sequence
  Description of Artificial Sequence:  Enzymatic Nucleic Acid
taaaaaaaggctagctacaacgaaaaacaaa

SEQ ID NO: 6629 - DNA, 31 bp, Artificial Sequence
  Description of Artificial Sequence:  Enzymatic Nucleic Acid
ttatttcaggctagctacaacgactttaaaa

SEQ ID NO: 6630 - DNA, 31 bp, Artificial Sequence
  Description of Artificial Sequence:  Enzymatic Nucleic Acid
ggtctttaggctagctacaacgattcatctt

SEQ ID NO: 6631 - DNA, 31 bp, Artificial Sequence
  Description of Artificial Sequence:  Enzymatic Nucleic Acid
cccctgggggctagctacaacgactttattt

SEQ ID NO: 6632 - RNA, 13 nt, Homo sapiens
ccaccaaugccag

SEQ ID NO: 6633 - RNA, 15 nt, Homo sapiens
uucuccgauguguaa

SEQ ID NO: 6634 - RNA, 13 nt, Homo sapiens
ugugcuauggucu

SEQ ID NO: 6635 - RNA, 15 nt, Homo sapiens
ccucagcgucuucca

SEQ ID NO: 6636 - RNA, 15 nt, Homo sapiens
auccaccauaacacc

SEQ ID NO: 6637 - DNA, 27 bp, Artificial Sequence
  Description of Artificial Sequence:  Enzymatic Nucleic Acid
  misc_feature (1)..(6): 2'-O-Methyl
  misc_feature (22)..(27): 2'-O-Methyl
  misc_feature (27)..(27): 3'-3 attached terminal deoxyabasic moeity
cuggcaggctagctacaacgauggugg

SEQ ID NO: 6638 - DNA, 29 bp, Artificial Sequence
  Description of Artificial Sequence:  Enzymatic Nucleic Acid
  misc_feature (1)..(7): 2'-O-Methyl
  misc_feature (23)..(29): 2'-O-Methyl
  misc_feature (29)..(29): 3'-3 attached terminal deoxyabasic moeity
uuacacaggctagctacaacgacggagaa

SEQ ID NO: 6639 - DNA, 27 bp, Artificial Sequence
  Description of Artificial Sequence:  Enzymatic Nucleic Acid
  misc_feature (1)..(6): 2'-O-Methyl
  misc_feature (22)..(27): 2'-O-Methyl
  misc_feature (27)..(27): 3'-3 attached terminal deoxyabasic moeity
agaccaggctagctacaacgaagcaca

SEQ ID NO: 6640 - DNA, 29 bp, Artificial Sequence
  Description of Artificial Sequence:  Enzymatic Nucleic Acid
  misc_feature (1)..(7): 2'-O-Methyl
  misc_feature (23)..(29): 2'-O-Methyl
  misc_feature (29)..(29): 3'-3 attached terminal deoxyabasic moeity
uggaagaggctagctacaacgagcugagg

SEQ ID NO: 6641 - DNA, 29 bp, Artificial Sequence
  Description of Artificial Sequence:  Enzymatic Nucleic Acid
  misc_feature (1)..(7): 2'-O-Methyl
  misc_feature (23)..(29): 2'-O-Methyl
  misc_feature (29)..(29): 3'-3 attached terminal deoxyabasic moeity
gguguuaggctagctacaacgagguggau

SEQ ID NO: 6642 - RNA, 17 nt, Homo sapiens
auaaagcuugccuugag

SEQ ID NO: 6643 - RNA, 17 nt, Homo sapiens
aggcuaauuuuuuaggg

SEQ ID NO: 6644 - RNA, 17 nt, Homo sapiens
ggcuaauuuuuuaggga

SEQ ID NO: 6645 - RNA, 17 nt, Homo sapiens
gccucaauaaagcuugc

SEQ ID NO: 6646 - RNA, 17 nt, Homo sapiens
uuucggguuuauuacag

SEQ ID NO: 6647 - RNA, 17 nt, Homo sapiens
gcaggacucggcuugcu

SEQ ID NO: 6648 - RNA, 17 nt, Homo sapiens
uggaaaacagauggcag

SEQ ID NO: 6649 - RNA, 17 nt, Homo sapiens
aauaaagcuugccuuga

SEQ ID NO: 6650 - RNA, 17 nt, Homo sapiens
ucucuagcaguggcgcc

SEQ ID NO: 6651 - RNA, 17 nt, Homo sapiens
ggagccaccccacaaga

SEQ ID NO: 6652 - RNA, 17 nt, Homo sapiens
aguggcgcccgaacagg

SEQ ID NO: 6653 - RNA, 17 nt, Homo sapiens
guggcgcccgaacaggg

SEQ ID NO: 6654 - RNA, 17 nt, Homo sapiens
cucgacgcaggacucgg

SEQ ID NO: 6655 - RNA, 17 nt, Homo sapiens
cgcaggacucggcuugc

SEQ ID NO: 6656 - RNA, 17 nt, Homo sapiens
ucaauaaagcuugccuu

SEQ ID NO: 6657 - RNA, 17 nt, Homo sapiens
aggacucggcuugcuga

SEQ ID NO: 6658 - RNA, 17 nt, Homo sapiens
gcaguggcgcccgaaca

SEQ ID NO: 6659 - RNA, 17 nt, Homo sapiens
cucuagcaguggcgccc

SEQ ID NO: 6660 - RNA, 17 nt, Homo sapiens
uagcaguggcgcccgaa

SEQ ID NO: 6661 - RNA, 17 nt, Homo sapiens
agagaugggugcgagag

SEQ ID NO: 6662 - RNA, 17 nt, Homo sapiens
agaugggugcgagagcg

SEQ ID NO: 6663 - RNA, 17 nt, Homo sapiens
cucucgacgcaggacuc

SEQ ID NO: 6664 - RNA, 17 nt, Homo sapiens
uauggaaaacagauggc

SEQ ID NO: 6665 - RNA, 17 nt, Homo sapiens
gaaaacagauggcaggu

SEQ ID NO: 6666 - RNA, 17 nt, Homo sapiens
aagccucaauaaagcuu

SEQ ID NO: 6667 - RNA, 17 nt, Homo sapiens
ggagagagaugggugcg

SEQ ID NO: 6668 - RNA, 17 nt, Homo sapiens
gacgcaggacucggcuu

SEQ ID NO: 6669 - RNA, 17 nt, Homo sapiens
ggaaaacagauggcagg

SEQ ID NO: 6670 - RNA, 17 nt, Homo sapiens
augggugcgagagcguc

SEQ ID NO: 6671 - RNA, 17 nt, Homo sapiens
aaaaggggggauugggg

SEQ ID NO: 6672 - RNA, 17 nt, Homo sapiens
agaaaaggggggauugg

SEQ ID NO: 6673 - RNA, 17 nt, Homo sapiens
gaaaaggggggauuggg

SEQ ID NO: 6674 - RNA, 17 nt, Homo sapiens
ggcuagaaggagagaga

SEQ ID NO: 6675 - RNA, 17 nt, Homo sapiens
uuuuaaaagaaaagggg

SEQ ID NO: 6676 - RNA, 17 nt, Homo sapiens
uauggcaggaagaagcg

SEQ ID NO: 6677 - RNA, 17 nt, Homo sapiens
uggcgcccgaacaggga

SEQ ID NO: 6678 - RNA, 17 nt, Homo sapiens
gagagaugggugcgaga

SEQ ID NO: 6679 - RNA, 17 nt, Homo sapiens
cgacgcaggacucggcu

SEQ ID NO: 6680 - RNA, 17 nt, Homo sapiens
ugacuagcggaggcuag

SEQ ID NO: 6681 - RNA, 17 nt, Homo sapiens
uagaaggagagagaugg

SEQ ID NO: 6682 - RNA, 17 nt, Homo sapiens
aggagagagaugggugc

SEQ ID NO: 6683 - RNA, 17 nt, Homo sapiens
gaaggagagagaugggu

SEQ ID NO: 6684 - RNA, 17 nt, Homo sapiens
ucgacgcaggacucggc

SEQ ID NO: 6685 - RNA, 17 nt, Homo sapiens
cuagcaguggcgcccga

SEQ ID NO: 6686 - RNA, 17 nt, Homo sapiens
gacuagcggaggcuaga

SEQ ID NO: 6687 - RNA, 17 nt, Homo sapiens
gcuagaaggagagagau

SEQ ID NO: 6688 - RNA, 17 nt, Homo sapiens
aaaggggggauuggggg

SEQ ID NO: 6689 - RNA, 17 nt, Homo sapiens
auggaaaacagauggca

SEQ ID NO: 6690 - RNA, 17 nt, Homo sapiens
caggcuaauuuuuuagg

SEQ ID NO: 6691 - RNA, 17 nt, Homo sapiens
cucaauaaagcuugccu

SEQ ID NO: 6692 - RNA, 17 nt, Homo sapiens
caauaaagcuugccuug

SEQ ID NO: 6693 - RNA, 17 nt, Homo sapiens
caguggcgcccgaacag

SEQ ID NO: 6694 - RNA, 17 nt, Homo sapiens
gaggcuagaaggagaga

SEQ ID NO: 6695 - RNA, 17 nt, Homo sapiens
uuaaauaaaauaguaag

SEQ ID NO: 6696 - RNA, 17 nt, Homo sapiens
gaugggugcgagagcgu

SEQ ID NO: 6697 - RNA, 17 nt, Homo sapiens
uuaaaagaaaagggggg

SEQ ID NO: 6698 - RNA, 17 nt, Homo sapiens
uuuaaaagaaaaggggg

SEQ ID NO: 6699 - RNA, 17 nt, Homo sapiens
agccucaauaaagcuug

SEQ ID NO: 6700 - RNA, 17 nt, Homo sapiens
ccucaauaaagcuugcc

SEQ ID NO: 6701 - RNA, 17 nt, Homo sapiens
ggcgcccgaacagggac

SEQ ID NO: 6702 - RNA, 17 nt, Homo sapiens
gagagagaugggugcga

SEQ ID NO: 6703 - RNA, 17 nt, Homo sapiens
agcaguggcgcccgaac

SEQ ID NO: 6704 - RNA, 17 nt, Homo sapiens
auggcaggaagaagcgg

SEQ ID NO: 6705 - RNA, 17 nt, Homo sapiens
aggcuagaaggagagag

SEQ ID NO: 6706 - RNA, 17 nt, Homo sapiens
uaaaagaaaagggggga

SEQ ID NO: 6707 - RNA, 17 nt, Homo sapiens
gagaugggugcgagagc

SEQ ID NO: 6708 - RNA, 17 nt, Homo sapiens
aaaacagauggcaggug

SEQ ID NO: 6709 - RNA, 17 nt, Homo sapiens
acgcaggacucggcuug

SEQ ID NO: 6710 - RNA, 17 nt, Homo sapiens
aaggagagagaugggug

SEQ ID NO: 6711 - RNA, 17 nt, Homo sapiens
cuagaaggagagagaug

SEQ ID NO: 6712 - RNA, 17 nt, Homo sapiens
ucuagcaguggcgcccg

SEQ ID NO: 6713 - RNA, 17 nt, Homo sapiens
uggcaggaagaagcgga

SEQ ID NO: 6714 - RNA, 17 nt, Homo sapiens
agaaggagagagauggg

SEQ ID NO: 6715 - RNA, 17 nt, Homo sapiens
uccuauggcaggaagaa

SEQ ID NO: 6716 - RNA, 17 nt, Homo sapiens
uggaaaggugaaggggc

SEQ ID NO: 6717 - RNA, 17 nt, Homo sapiens
aucucuagcaguggcgc

SEQ ID NO: 6718 - RNA, 15 nt, Homo sapiens
gagaugggugcgaga

SEQ ID NO: 6719 - RNA, 15 nt, Homo sapiens
auggaaaacagaugg

SEQ ID NO: 6720 - RNA, 15 nt, Homo sapiens
aaaacagauggcagg

SEQ ID NO: 6721 - RNA, 15 nt, Homo sapiens
agccucaauaaagcu

SEQ ID NO: 6722 - RNA, 15 nt, Homo sapiens
gagagagaugggugc

SEQ ID NO: 6723 - RNA, 15 nt, Homo sapiens
caauaaagcuugccu

SEQ ID NO: 6724 - RNA, 15 nt, Homo sapiens
ggacucggcuugcug

SEQ ID NO: 6725 - RNA, 15 nt, Homo sapiens
gaugggugcgagagc

SEQ ID NO: 6726 - RNA, 15 nt, Homo sapiens
ucucgacgcaggacu

SEQ ID NO: 6727 - RNA, 38 nt, Artificial Sequence
  Description of Artificial Sequence:  Enzymatic Nucleic Acid
cucaaggccugaugaggccguuaggccgaaagcuuuau

SEQ ID NO: 6728 - RNA, 38 nt, Artificial Sequence
  Description of Artificial Sequence:  Enzymatic Nucleic Acid
cccuaaaacugaugaggccguuaggccgaaauuagccu

SEQ ID NO: 6729 - RNA, 38 nt, Artificial Sequence
  Description of Artificial Sequence:  Enzymatic Nucleic Acid
ucccuaaacugaugaggccguuaggccgaaaauuagcc

SEQ ID NO: 6730 - RNA, 38 nt, Artificial Sequence
  Description of Artificial Sequence:  Enzymatic Nucleic Acid
gcaagcuucugaugaggccguuaggccgaaauugaggc

SEQ ID NO: 6731 - RNA, 38 nt, Artificial Sequence
  Description of Artificial Sequence:  Enzymatic Nucleic Acid
cuguaauacugaugaggccguuaggccgaaacccgaaa

SEQ ID NO: 6732 - RNA, 38 nt, Artificial Sequence
  Description of Artificial Sequence:  Enzymatic Nucleic Acid
agcaagcccugaugaggccguuaggccgaaaguccugc

SEQ ID NO: 6733 - RNA, 38 nt, Artificial Sequence
  Description of Artificial Sequence:  Enzymatic Nucleic Acid
cugccauccugaugaggccguuaggccgaawuuuucca

SEQ ID NO: 6734 - RNA, 38 nt, Artificial Sequence
  Description of Artificial Sequence:  Enzymatic Nucleic Acid
ucaaggcacugaugaggccguuaggccgaawcuuuauu

SEQ ID NO: 6735 - RNA, 38 nt, Artificial Sequence
  Description of Artificial Sequence:  Enzymatic Nucleic Acid
ggcgccaccugaugaggccguuaggccgaawcuagaga

SEQ ID NO: 6736 - RNA, 38 nt, Artificial Sequence
  Description of Artificial Sequence:  Enzymatic Nucleic Acid
ucuuguggcugaugaggccguuaggccgaawuggcucc

SEQ ID NO: 6737 - RNA, 38 nt, Artificial Sequence
  Description of Artificial Sequence:  Enzymatic Nucleic Acid
ccuguucgcugaugaggccguuaggccgaawcgccacu

SEQ ID NO: 6738 - RNA, 38 nt, Artificial Sequence
  Description of Artificial Sequence:  Enzymatic Nucleic Acid
cccuguuccugaugaggccguuaggccgaawgcgccac

SEQ ID NO: 6739 - RNA, 38 nt, Artificial Sequence
  Description of Artificial Sequence:  Enzymatic Nucleic Acid
ccgagucccugaugaggccguuaggccgaawcgucgag

SEQ ID NO: 6740 - RNA, 38 nt, Artificial Sequence
  Description of Artificial Sequence:  Enzymatic Nucleic Acid
gcaagccgcugaugaggccguuaggccgaawuccugcg

SEQ ID NO: 6741 - RNA, 37 nt, Artificial Sequence
  Description of Artificial Sequence:  Enzymatic Nucleic Acid
aaggcaaggccgaaaggcgagugaggucuuuuauuga

SEQ ID NO: 6742 - RNA, 37 nt, Artificial Sequence
  Description of Artificial Sequence:  Enzymatic Nucleic Acid
ucagcaaggccgaaaggcgagugaggucucgaguccu

SEQ ID NO: 6743 - RNA, 37 nt, Artificial Sequence
  Description of Artificial Sequence:  Enzymatic Nucleic Acid
uguucggggccgaaaggcgagugaggucugccacugc

SEQ ID NO: 6744 - RNA, 37 nt, Artificial Sequence
  Description of Artificial Sequence:  Enzymatic Nucleic Acid
gggcgccagccgaaaggcgagugaggucuugcuagag

SEQ ID NO: 6745 - RNA, 37 nt, Artificial Sequence
  Description of Artificial Sequence:  Enzymatic Nucleic Acid
uucgggcggccgaaaggcgagugaggucucacugcua

SEQ ID NO: 6746 - RNA, 37 nt, Artificial Sequence
  Description of Artificial Sequence:  Enzymatic Nucleic Acid
cucucgcagccgaaaggcgagugaggucuccaucucu

SEQ ID NO: 6747 - RNA, 37 nt, Artificial Sequence
  Description of Artificial Sequence:  Enzymatic Nucleic Acid
cgcucucggccgaaaggcgagugaggucuacccaucu

SEQ ID NO: 6748 - RNA, 37 nt, Artificial Sequence
  Description of Artificial Sequence:  Enzymatic Nucleic Acid
gaguccuggccgaaaggcgagugaggucugucgagag

SEQ ID NO: 6749 - DNA, 31 bp, Artificial Sequence
  Description of Artificial Sequence:  Enzymatic Nucleic Acid
aaggcaagggctagctacaacgatttattga

SEQ ID NO: 6750 - DNA, 31 bp, Artificial Sequence
  Description of Artificial Sequence:  Enzymatic Nucleic Acid
tcagcaagggctagctacaacgacgagtcct

SEQ ID NO: 6751 - DNA, 31 bp, Artificial Sequence
  Description of Artificial Sequence:  Enzymatic Nucleic Acid
tgttcgggggctagctacaacgagccactgc

SEQ ID NO: 6752 - DNA, 31 bp, Artificial Sequence
  Description of Artificial Sequence:  Enzymatic Nucleic Acid
gggcgccaggctagctacaacgatgctagag

SEQ ID NO: 6753 - DNA, 31 bp, Artificial Sequence
  Description of Artificial Sequence:  Enzymatic Nucleic Acid
ttcgggcgggctagctacaacgacactgcta

SEQ ID NO: 6754 - DNA, 31 bp, Artificial Sequence
  Description of Artificial Sequence:  Enzymatic Nucleic Acid
ctctcgcaggctagctacaacgaccatctct

SEQ ID NO: 6755 - DNA, 31 bp, Artificial Sequence
  Description of Artificial Sequence:  Enzymatic Nucleic Acid
cgctctcgggctagctacaacgaacccatct

SEQ ID NO: 6756 - DNA, 31 bp, Artificial Sequence
  Description of Artificial Sequence:  Enzymatic Nucleic Acid
gagtcctgggctagctacaacgagtcgagag

SEQ ID NO: 6757 - DNA, 31 bp, Artificial Sequence
  Description of Artificial Sequence:  Enzymatic Nucleic Acid
gccatctgggctagctacaacgatttccata

SEQ ID NO: 6758 - DNA, 31 bp, Artificial Sequence
  Description of Artificial Sequence:  Enzymatic Nucleic Acid
acctgccaggctagctacaacgactgttttc

SEQ ID NO: 6759 - DNA, 31 bp, Artificial Sequence
  Description of Artificial Sequence:  Enzymatic Nucleic Acid
aagctttaggctagctacaacgatgaggctt

SEQ ID NO: 6760 - DNA, 31 bp, Artificial Sequence
  Description of Artificial Sequence:  Enzymatic Nucleic Acid
cgcacccaggctagctacaacgactctctcc

SEQ ID NO: 6761 - DNA, 31 bp, Artificial Sequence
  Description of Artificial Sequence:  Enzymatic Nucleic Acid
aagccgagggctagctacaacgacctgcgtc

SEQ ID NO: 6762 - RNA, 48 nt, Artificial Sequence
  Description of Artificial Sequence:  Enzymatic Nucleic Acid
aaggcaagggaggaaacucccuucaaggacaucguccggguuuauuga

SEQ ID NO: 6763 - RNA, 48 nt, Artificial Sequence
  Description of Artificial Sequence:  Enzymatic Nucleic Acid
ucagcaagggaggaaacucccuucaaggacaucguccgggcgaguccu

SEQ ID NO: 6764 - RNA, 48 nt, Artificial Sequence
  Description of Artificial Sequence:  Enzymatic Nucleic Acid
uguucgggggaggaaacucccuucaaggacaucguccggggccacugc

SEQ ID NO: 6765 - RNA, 48 nt, Artificial Sequence
  Description of Artificial Sequence:  Enzymatic Nucleic Acid
gggcgccaggaggaaacucccuucaaggacaucguccgggugcuagag

SEQ ID NO: 6766 - RNA, 48 nt, Artificial Sequence
  Description of Artificial Sequence:  Enzymatic Nucleic Acid
uucgggcgggaggaaacucccuucaaggacaucguccgggcacugcua

SEQ ID NO: 6767 - RNA, 48 nt, Artificial Sequence
  Description of Artificial Sequence:  Enzymatic Nucleic Acid
cucucgcaggaggaaacucccuucaaggacaucguccgggccaucucu

SEQ ID NO: 6768 - RNA, 48 nt, Artificial Sequence
  Description of Artificial Sequence:  Enzymatic Nucleic Acid
cgcucucgggaggaaacucccuucaaggacaucguccgggacccaucu

SEQ ID NO: 6769 - RNA, 48 nt, Artificial Sequence
  Description of Artificial Sequence:  Enzymatic Nucleic Acid
gaguccugggaggaaacucccuucaaggacaucguccggggucgagag

SEQ ID NO: 6770 - RNA, 48 nt, Artificial Sequence
  Description of Artificial Sequence:  Enzymatic Nucleic Acid
ccugccauggaggaaacucccuucaaggacaucguccggguguuuucc

SEQ ID NO: 6771 - RNA, 48 nt, Artificial Sequence
  Description of Artificial Sequence:  Enzymatic Nucleic Acid
gacgcucuggaggaaacucccuucaaggacaucguccggggcacccau

SEQ ID NO: 6772 - RNA, 48 nt, Artificial Sequence
  Description of Artificial Sequence:  Enzymatic Nucleic Acid
ccccaaucggaggaaacucccuucaaggacaucguccgggccccuuuu

SEQ ID NO: 6773 - RNA, 48 nt, Artificial Sequence
  Description of Artificial Sequence:  Enzymatic Nucleic Acid
ccaaucccggaggaaacucccuucaaggacaucguccgggccuuuucu

SEQ ID NO: 6774 - RNA, 48 nt, Artificial Sequence
  Description of Artificial Sequence:  Enzymatic Nucleic Acid
cccaauccggaggaaacucccuucaaggacaucguccgggcccuuuuc

SEQ ID NO: 6775 - RNA, 48 nt, Artificial Sequence
  Description of Artificial Sequence:  Enzymatic Nucleic Acid
ucucucucggaggaaacucccuucaaggacaucguccggguucuagcc

SEQ ID NO: 6776 - RNA, 48 nt, Artificial Sequence
  Description of Artificial Sequence:  Enzymatic Nucleic Acid
ccccuuuuggaggaaacucccuucaaggacaucguccggguuuuaaaa

SEQ ID NO: 6777 - RNA, 48 nt, Artificial Sequence
  Description of Artificial Sequence:  Enzymatic Nucleic Acid
cgcuucuuggaggaaacucccuucaaggacaucguccgggcugccaua

SEQ ID NO: 6778 - RNA, 48 nt, Artificial Sequence
  Description of Artificial Sequence:  Enzymatic Nucleic Acid
ucccuguuggaggaaacucccuucaaggacaucguccggggggcgcca

SEQ ID NO: 6779 - RNA, 48 nt, Artificial Sequence
  Description of Artificial Sequence:  Enzymatic Nucleic Acid
ucucgcacggaggaaacucccuucaaggacaucguccgggcaucucuc

SEQ ID NO: 6780 - RNA, 48 nt, Artificial Sequence
  Description of Artificial Sequence:  Enzymatic Nucleic Acid
agccgaguggaggaaacucccuucaaggacaucguccgggcugcgucg

SEQ ID NO: 6781 - RNA, 48 nt, Artificial Sequence
  Description of Artificial Sequence:  Enzymatic Nucleic Acid
cuagccucggaggaaacucccuucaaggacaucguccggggcuaguca

SEQ ID NO: 6782 - RNA, 48 nt, Artificial Sequence
  Description of Artificial Sequence:  Enzymatic Nucleic Acid
ccaucucuggaggaaacucccuucaaggacaucguccggguccuucua

SEQ ID NO: 6783 - RNA, 48 nt, Artificial Sequence
  Description of Artificial Sequence:  Enzymatic Nucleic Acid
gcacccauggaggaaacucccuucaaggacaucguccgggucucuccu

SEQ ID NO: 6784 - RNA, 48 nt, Artificial Sequence
  Description of Artificial Sequence:  Enzymatic Nucleic Acid
acccaucuggaggaaacucccuucaaggacaucguccgggucuccuuc

SEQ ID NO: 6785 - RNA, 48 nt, Artificial Sequence
  Description of Artificial Sequence:  Enzymatic Nucleic Acid
gccgagucggaggaaacucccuucaaggacaucguccgggugcgucga

SEQ ID NO: 6786 - RNA, 48 nt, Artificial Sequence
  Description of Artificial Sequence:  Enzymatic Nucleic Acid
ucgggcgcggaggaaacucccuucaaggacaucguccgggacugcuag

SEQ ID NO: 6787 - RNA, 48 nt, Artificial Sequence
  Description of Artificial Sequence:  Enzymatic Nucleic Acid
ucuagccuggaggaaacucccuucaaggacaucguccgggcgcuaguc

SEQ ID NO: 6788 - RNA, 48 nt, Artificial Sequence
  Description of Artificial Sequence:  Enzymatic Nucleic Acid
aucucucuggaggaaacucccuucaaggacaucguccgggcuucuagc

SEQ ID NO: 6789 - RNA, 48 nt, Artificial Sequence
  Description of Artificial Sequence:  Enzymatic Nucleic Acid
cccccaauggaggaaacucccuucaaggacaucguccgggcccccuuu

SEQ ID NO: 6790 - DNA, 29 bp, Artificial Sequence
  Description of Artificial Sequence:  Enzymatic Nucleic Acid
  misc_feature (1)..(7): 2'-O-Methyl
  misc_feature (23)..(29): 2'-O-Methyl
  misc_feature (29)..(29): 3'-3 attached terminal deoxyabasic moeity
ucucgcaggctagctacaacgaccaucuc

SEQ ID NO: 6791 - DNA, 29 bp, Artificial Sequence
  Description of Artificial Sequence:  Enzymatic Nucleic Acid
  misc_feature (1)..(7): 2'-O-Methyl
  misc_feature (23)..(29): 2'-O-Methyl
  misc_feature (29)..(29): 3'-3 attached terminal deoxyabasic moeity
ccaucugggctagctacaacgauuuccau

SEQ ID NO: 6792 - DNA, 29 bp, Artificial Sequence
  Description of Artificial Sequence:  Enzymatic Nucleic Acid
  misc_feature (1)..(7): 2'-O-Methyl
  misc_feature (23)..(29): 2'-O-Methyl
  misc_feature (29)..(29): 3'-3 attached terminal deoxyabasic moeity
ccugccaggctagctacaacgacuguuuu

SEQ ID NO: 6793 - DNA, 29 bp, Artificial Sequence
  Description of Artificial Sequence:  Enzymatic Nucleic Acid
  misc_feature (1)..(7): 2'-O-Methyl
  misc_feature (23)..(29): 2'-O-Methyl
  misc_feature (29)..(29): 3'-3 attached terminal deoxyabasic moeity
agcuuuaggctagctacaacgaugaggcu

SEQ ID NO: 6794 - DNA, 29 bp, Artificial Sequence
  Description of Artificial Sequence:  Enzymatic Nucleic Acid
  misc_feature (1)..(7): 2'-O-Methyl
  misc_feature (23)..(29): 2'-O-Methyl
  misc_feature (29)..(29): 3'-3 attached terminal deoxyabasic moeity
gcacccaggctagctacaacgacucucuc

SEQ ID NO: 6795 - RNA, 35 nt, Artificial Sequence
  Description of Artificial Sequence:  Enzymatic Nucleic Acid
  misc_feature (1)..(16): 2'-O-Methyl
  misc_feature (18)..(23): 2'-O-Methyl
  misc_feature (26)..(26): 2'-O-Methyl
  misc_feature (28)..(35): 2'-O-Methyl
  misc_feature (17)..(17): 2'-deoxy-2'-amino
  misc_feature (27)..(27): 2'-deoxy-2'-amino
  misc_feature (35)..(35): 3'-3 attached terminal deoxyabasic moeity
aggcaaggccgaaaggcgagugaggucuuuuauug

SEQ ID NO: 6796 - RNA, 35 nt, Artificial Sequence
  Description of Artificial Sequence:  Enzymatic Nucleic Acid
  misc_feature (1)..(16): 2'-O-Methyl
  misc_feature (18)..(23): 2'-O-Methyl
  misc_feature (26)..(26): 2'-O-Methyl
  misc_feature (28)..(35): 2'-O-Methyl
  misc_feature (17)..(17): 2'-deoxy-2'-amino
  misc_feature (27)..(27): 2'-deoxy-2'-amino
  misc_feature (35)..(35): 3'-3 attached terminal deoxyabasic moeity
cagcaaggccgaaaggcgagugaggucucgagucc

SEQ ID NO: 6797 - RNA, 35 nt, Artificial Sequence
  Description of Artificial Sequence:  Enzymatic Nucleic Acid
  misc_feature (1)..(16): 2'-O-Methyl
  misc_feature (18)..(23): 2'-O-Methyl
  misc_feature (26)..(26): 2'-O-Methyl
  misc_feature (28)..(35): 2'-O-Methyl
  misc_feature (17)..(17): 2'-deoxy-2'-amino
  misc_feature (27)..(27): 2'-deoxy-2'-amino
  misc_feature (35)..(35): 3'-3 attached terminal deoxyabasic moeity
ucucgcagccgaaaggcgagugaggucuccaucuc

SEQ ID NO: 6798 - RNA, 35 nt, Artificial Sequence
  Description of Artificial Sequence:  Enzymatic Nucleic Acid
  misc_feature (1)..(16): 2'-O-Methyl
  misc_feature (18)..(23): 2'-O-Methyl
  misc_feature (26)..(26): 2'-O-Methyl
  misc_feature (28)..(35): 2'-O-Methyl
  misc_feature (17)..(17): 2'-deoxy-2'-amino
  misc_feature (27)..(27): 2'-deoxy-2'-amino
  misc_feature (35)..(35): 3'-3 attached terminal deoxyabasic moeity
gcucucggccgaaaggcgagugaggucuacccauc

SEQ ID NO: 6799 - RNA, 35 nt, Artificial Sequence
  Description of Artificial Sequence:  Enzymatic Nucleic Acid
  misc_feature (1)..(16): 2'-O-Methyl
  misc_feature (18)..(23): 2'-O-Methyl
  misc_feature (26)..(26): 2'-O-Methyl
  misc_feature (28)..(35): 2'-O-Methyl
  misc_feature (17)..(17): 2'-deoxy-2'-amino
  misc_feature (27)..(27): 2'-deoxy-2'-amino
  misc_feature (35)..(35): 3'-3 attached terminal deoxyabasic moeity
aguccuggccgaaaggcgagugaggucugucgaga

SEQ ID NO: 6800 - RNA, 15 nt, Artificial Sequence
  Description of Artificial Sequence:  Enzymatic Nucleic Acid
  misc_feature (1)..(6): n stands for a, c, g, or u
  misc_feature (9)..(15): n stands for a, c, g, or u
nnnnnnuhnnnnnnn

SEQ ID NO: 6801 - RNA, 36 nt, Artificial Sequence
  Description of Artificial Sequence:  Enzymatic Nucleic Acid
  misc_feature (1)..(7): n stands for a, c, g, or u
  misc_feature (16)..(18): n stands for a, c, g, or u
  misc_feature (23)..(25): n stands for a, c, g, or u
  misc_feature (31)..(36): n stands for a, c, g, or u
  misc_feature (1)..(8): 2'-O-Methyl
  misc_feature (12)..(12): 2'-O-Methyl
  misc_feature (14)..(26): 2'-O-Methyl
  misc_feature (28)..(29): 2'-O-Methyl
  misc_feature (31)..(36): 2'-O-Methyl
  misc_feature (9)..(9): 2'-deoxy-2'-C-Allyl
nnnnnnncugaugagnnngaaannncgaaannnnnn

SEQ ID NO: 6802 - RNA, 14 nt, Artificial Sequence
  Description of Artificial Sequence:  Enzymatic Nucleic Acid
  misc_feature (1)..(5): n stands for a, c, g, or u
  misc_feature (8)..(14): n stands for a, c, g, or u
nnnnnchnnnnnnn

SEQ ID NO: 6803 - RNA, 35 nt, Artificial Sequence
  Description of Artificial Sequence:  Enzymatic Nucleic Acid
  misc_feature (1)..(7): n stands for a, c, g, or u
  misc_feature (16)..(18): n stands for a, c, g, or u
  misc_feature (23)..(25): n stands for a, c, g, or u
  misc_feature (31)..(35): n stands for a, c, g, or u
  misc_feature (1)..(8): 2'-O-Methyl
  misc_feature (12)..(12): 2'-O-Methyl
  misc_feature (14)..(26): 2'-O-Methyl
  misc_feature (28)..(29): 2'-O-Methyl
  misc_feature (31)..(35): 2'-O-Methyl
  misc_feature (30)..(30): n stands for Inosine
  misc_feature (9)..(9): 2'-deoxy-2'-C-Allyl
nnnnnnncugaugagnnngaaannncgaannnnnn

SEQ ID NO: 6804 - RNA, 15 nt, Artificial Sequence
  Description of Artificial Sequence:  Enzymatic Nucleic Acid
  misc_feature (1)..(6): n stands for a, c, g, or u
  misc_feature (9)..(15): n stands for a, c, g, or u
nnnnnnygnnnnnnn

SEQ ID NO: 6805 - RNA, 35 nt, Artificial Sequence
  Description of Artificial Sequence:  Enzymatic Nucleic Acid
  misc_feature (1)..(7): n stands for a, c, g, or u
  misc_feature (29)..(35): n stands for a, c, g, or u
  misc_feature (1)..(8): 2'-O-Methyl
  misc_feature (13)..(16): 2'-O-Methyl
  misc_feature (18)..(35): 2'-O-Methyl
  misc_feature (11)..(11): Phosphorothioate 3'-Internucleotide Linkage
nnnnnnnugauggcaugcacuaugcgcgnnnnnnn

SEQ ID NO: 6806 - RNA, 48 nt, Artificial Sequence
  Description of Artificial Sequence:  Enzymatic Nucleic Acid
  misc_feature (1)..(8): 2'-O-Methyl
  misc_feature (12)..(21): 2'-O-Methyl
  misc_feature (32)..(37): 2'-O-Methyl
  misc_feature (44)..(48): 2'-O-Methyl
  misc_feature (9)..(10): 2'-deoxy-2'-amino
  misc_feature (22)..(26): 2'-deoxy-2'-amino
  misc_feature (38)..(40): 2'-deoxy-2'-amino
gugugcaaccggaggaaacucccuucaaggacgaaaguccgggacggg

SEQ ID NO: 6807 - RNA, 16 nt, Artificial Sequence
  Description of Artificial Sequence:  Enzymatic Nucleic Acid
gccguggguugcacac

SEQ ID NO: 6808 - RNA, 35 nt, Artificial Sequence
  Description of Artificial Sequence:  Enzymatic Nucleic Acid
  misc_feature (1)..(7): 2'-O-Methyl
  misc_feature (35)..(35): 3'-3 attached terminal deoxyabasic moeity
  misc_feature (9)..(15): 2'-O-Methyl
  misc_feature (19)..(19): 2'-O-Methyl
  misc_feature (21)..(21): 2'-O-Methyl
  misc_feature (23)..(23): 2'-O-Methyl
  misc_feature (26)..(26): 2'-O-Methyl
  misc_feature (28)..(35): 2'-O-Methyl
  misc_feature (1)..(4): Phosphorothioate 3'-Internucleotide Linkage
  misc_feature (17)..(17): 2'-Deoxy-2'-Amino
  misc_feature (27)..(27): 2'-Deoxy-2'-Amino
gugccuggccgaaaggcgagugaggucugccgcgc

SEQ ID NO: 6809 - RNA, 15 nt, Artificial Sequence
  Description of Artificial Sequence:  Enzymatic Nucleic Acid
gcgcggcgcaggcac

SEQ ID NO: 6810 - DNA, 16 bp, Artificial Sequence
  Description of Artificial Sequence:  Enzymatic Nucleic Acid
rggctagctacaacga
